United States Patent Application Publication US 2026/0297606 A1, published October 1, 2026 (application 19/477,897).

The application's sequence listing, which the Patent Office published only in electronic form, follows.

SEQUENCE LISTING (804 sequences)

SEQ ID NO: 1 - DNA, 134 bp, Tobacco mosaic virus
  source 1..134: mol_type = other DNA
taggtttgagagagaagattacaaacgtgagagacggagggcccatggaacttacagaagaagtcgttgatgagttcatggaagatgtccctatgtcgatcaggcttgcaaagtttcgatctcgaaccggaaaa

SEQ ID NO: 2 - DNA, 198 bp, Tobacco mild green mosaic virus
  source 1..198: mol_type = other DNA
aaggtttgagggaacgtattttgagtgtgacagacggctcgccaattgaactcactgaaaaggttgttgaggagttcgtggatgaagtaccaatggctgtgaaactcgaaaaggttccggaaaacaaaaaagaaatggtaggtaataatgttaataataagaaaataaataacagtggtaagaagggttttaaaattg

SEQ ID NO: 3 - DNA, 133 bp, Tomato mosaic virus
  source 1..133: mol_type = other DNA
tgggtttgagggagaaagtaacgagtgtgaacgatggaggacccatggaactttcagaagaagttgttgatgagttcatggagaatgttccaatgtcggttagactcgcaaagtttcgaaccaaatcctcaaa

SEQ ID NO: 4 - DNA, 134 bp, Pepper mild mottle virus
  source 1..134: mol_type = other DNA
taggcttgagagagaaaattactagtgtgtcagaaggaggacccgttgaacttacagaagcagtcgttgatgagttcatcgaatcagttccaatggctgacagattacgtaaatttcgcaatcaatctaagaaa

SEQ ID NO: 5 - DNA, 139 bp, Paprika mild mottle virus
  source 1..139: mol_type = other DNA
aaggtttacgagagaaagtgactacagtgtcagaggacagcgctattgaacttacagaggaagttgttgatgagttcatagaggcagtaccgatggcacgtcggttgcaaaatttcaggaaacccaaaaataatattag

SEQ ID NO: 6 - DNA, 134 bp, Bell pepper mottle virus
  source 1..134: mol_type = other DNA
tgggtttgagggagaagattacaagagtaaccgacgccgggcctatggaacttactgaagaagttgttgatgagttcatagagaatgtcccgatggcggcaaggcttgcaagatttcgaaccaaatcctcaaaa

SEQ ID NO: 7 - DNA, 138 bp, Tomato mottle mosaic virus
  source 1..138: mol_type = other DNA
tgggtttgagggagaagattacaagagtggatgacgcaggtcccattgaacttaccgaagaagttgttgatgagttcatggagagtgtgcctatgtcagtcaggcttgctaaatttcgaaccaaatcctcaaaaagag

SEQ ID NO: 8 - DNA, 135 bp, Odontoglossum ringspot virus
  source 1..135: mol_type = other DNA
tcggactgagagagaagattttgaacgtaacagaaggagggcccaccgaacttactgaagcagttgttgatagattcgtggagaaagttcctatggctgctaggctcaagtcttttcgctctgtcaacaaaaaga

SEQ ID NO: 9 - DNA, 201 bp, Obuda pepper virus
  source 1..201: mol_type = other DNA
agggtctaagagagaaggtgactgccgtgtccgaagacgacgctatagaactcacagaagaggttgttgatgagtttatagaagccgtaccgatggcgcgacgtttgcagaacttgagaaaacccaagtacaacaaagaaaaagaaaataaaaatttgaataataaaaatagtataggagtttccaaacctgtcggtttag

SEQ ID NO: 10 - DNA, 136 bp, Rehmannia mosaic virus
  source 1..136: mol_type = other DNA
tgggtttgagggagaaaatcacaactgtgaaagatggaggacccatggaactcaccgaagaagtggtagacgagttcatggaagacgttccaatgtctgtcagacttgcgaagtttcgatctcgaaccggaaaaaa

SEQ ID NO: 11 - DNA, 134 bp, Brugmansia mild mottle virus
  source 1..134: mol_type = other DNA
aaggattgcgtgaaaggatcacgaatgttgccgaaggcggttcacttgagctcactgaagaagttgttgagagctttgtgaatgacgtccctatggcagtacgactgaaccatttacgtaatggaaacaaaaaa

SEQ ID NO: 12 - DNA, 134 bp, Yellow tailflower mild mottle virus
  source 1..134: mol_type = other DNA
ccggtctgagagagaaagtaacttccgtgtcagaagggtctccgattgaactcacagaagatgttgtagatgagtttttcgagagtgtccctatggctcgtaggttgcagaacttgaggaataggcgaggaaat

SEQ ID NO: 13 - DNA, 137 bp, Tropical soda apple mosaic virus
  source 1..137: mol_type = other DNA
ttggactgagggagaaaattacaaatgtctcagacggaggacccgtcgaacttacagaagaagttgttgatgagttcgtcgaatcagttcctatggctgagagattacgtaaatttcgaggacggtccaacaaaaag

SEQ ID NO: 14 - DNA, 432 bp, Cucumber green mottle mosaic virus
  source 1..432: mol_type = other DNA
taccctcgtctgtcgtagatattaattctagattcccagatgcgggtttttacgctttcctcaacggtcctgtgttgaggcctatcttcgtttcgcttctcagctccacggatacgcgtaatagggtcattgaggttgtagatcctagcaatcctacgactgctgagtcgcttaacgctgtaaagcgtactgatgacgcgtctacagccgctagggccgagatagataatttaatagagtctatttctaagggttttgatgtttacgatagggcttcatttgaagccgcgttttcggtagtctggtcagaggctaccacctcgaaagcttagtttcgagggtcttctgatggtggtgcacaccaaagtgcatagtgctttcccgttcacttaaatcgaacggtttgctcattggtttgcggaaacctctcac

SEQ ID NO: 15 - DNA, 347 bp, Cucumber fruit mottle mosaic virus
  source 1..347: mol_type = other DNA
tttttgtccttattatgctttgtatgatctgttggtgtcagcccaaggtggagccctgcaaacgcaaaatggtaaagacattttgcgtgactccataaatgggttgttaacgacagttgcgtctcctaggagtcggttccctgcggaagggttctttgtctggtcccgtgagtcgcgcattgctgctatattagattctctgctttcggcgttggattcaagaaatagggctattgaagttgaaaacccttctaatccttcgaccagtgaagctttgaatgctactaagcgcaatgacgacgcgtctactgctgcgcacaacgacattcctcagctgatttcagctt

SEQ ID NO: 16 - DNA, 297 bp, Kyuri green mottle mosaic virus
  source 1..297: mol_type = other DNA
tgttaacttctgttgcgtctctcaattcacgttttcctgctaatgagtttttcgtgtggtctcgtgagtcgcgcattgctgccataatcgattcgttgttatccgctttggattctagaaatagggctatcgaagttgaaaacccttctaatccttctaccggagaagctctgaatgcgaccaagcgcaatgacgacgcgtctacagccgcgcacaacgacattcctctgcttttagcagctctgaatgacggtgtgggcgtttttgatagtgcgtcttttgagtcagctttcggtc

SEQ ID NO: 17 - DNA, 335 bp, Zucchini green mottle mosaic virus
  source 1..335: mol_type = other DNA
tgctgtcttctgttgcgtcacccacttcacagtttccttccggtgtgttttatgtgtggtctcgtgagtcgcgcattgctgctttgatcgattctctcttcggtgctttggattcaagaaatagggctattgaagttgaaaacccttctaatccatcgactggcgaagctttgaacgcggttaagcgcaatgacgacgcgtctacagccgctcacaacgacattcctcagattttatctgctctgaatgaaggtgcgggcgtttttgatagagcgtcttttgaatctgcttttggtctcgtgtggaccgcaggttcgtctacctcgtcttgaggc

SEQ ID NO: 18 - DNA, 238 bp, Cucumber mottle virus
  source 1..238: mol_type = other DNA
tcttttcctcgcccgtgagtcctaccgtcagatttcctgacggagttttttatgtgtttttaggtaatcctgttttggatccgctttttaaagctctgttacagtcgttggatacaagaaatagggtcatagaggttgataacccttctaatcctacgactgctgagtctttaaacgctgtccagcgtactgacgattctactgtcagttcgcgtgtgggtttaataaacttgcgtgc

SEQ ID NO: 19 - DNA, 238 bp, unidentified
  source 1..238: mol_type = other DNA
ttttcacctctcctgtgagtccgaccgttagatttcctgacggtccgtttttcattttcttagggaatcctgtgttggatccgctttttaaagctcttctgcagtcgctggatacaagaaatagggttattgaggttgacaatccttctaatcctactactgcggaatctttgaacgcgattcagcgtactgacgactcttccgtcagttcgcatgtcggtctagttaaccttcgcgc

SEQ ID NO: 20 - DNA, 246 bp, Turnip vein-clearing virus
  source 1..246: mol_type = other DNA
agggtttgagggaaaaggtcgtcgcaataaatgatccggacgtcgaaggtttcgaaggtgtggttgacgaattcgtcgattcggttgcagcatttaaagcggttgacaatttcaggaagaggaaaaagaaggttgaagaaagggatgtagtaagtaagtataaatatagaccggagaaatacgccggtcctgattcgtttaatttaaaagaagaaaatgtcttacaacattacaaacccgaatcag

SEQ ID NO: 21 - DNA, 246 bp, Ribgrass mosaic virus
  source 1..246: mol_type = other DNA
agggtttgagagaaaagatcatcgcgataagtgatccggacgtcgaaggtttcgaaggagtggttgacgatttcgttgattcggtcgaagcatttagagcggttgataatttcaggaaaaagaaaaggaagataggagaaaaggaagcggtaagtaggaataagtacagaccggagaaacacgccggtcctaattcgttatatattaaagaagaaaatgtcttacaacatcacgagctcgaatcag

SEQ ID NO: 22 - DNA, 246 bp, Wasabi mottle virus
  source 1..246: mol_type = other DNA
agggtttaagagaaagagtcatcgctgtagatgatccgaacgttgagggtttcgaaggtgtagttgacgaattcatcgattcggttgcagcatttaaagcggttgacaatttcaggaaaaagaaaaggaagattggaggaagggatgtgattagtaagtataagtatagaccagagaagtacgccggtcctgattcgttacttaataaagaagaaaatgtcatacaacatcacgaactcgaatcag

SEQ ID NO: 23 - DNA, 249 bp, Youcai mosaic virus
  source 1..249: mol_type = other DNA
aaggtttgagggaaaaagtcatcgctgtgaatgatccgaacgtcgaaggtttcgaaggtgtggttgacgatttcgtcgattcggttgctgcattcaaggcgattgacagtttcaggaagaaaaagaaaaggattggaggaagggatgtaaatagtaataagtatagatatagaccggagagatacgccggtcctgattcgttacaatataaagaagaaaatggtttacaacatcacgagctcgaatcag

SEQ ID NO: 24 - DNA, 258 bp, Streptocarpus flower break virus
  source 1..258: mol_type = other DNA
agggtttgcgtgaaaggcttaataatgtgggagatccaaatgttgaagtttcagaagttgtcgttgatgagttcgtggactcgatttccgcttcacagtcgttaagccgtgctcgtaataaatacgttcgtggtaatggtaaggttgggaataatagtggtggttttagtaagtataatcgtcatcagccggagaggttcgccggcaaggctatgtataattctaaaaatgtcgtacgtggtggtacttccgaaccaa

SEQ ID NO: 25 - DNA, 333 bp, Rattail cactus necrosis-associated virus
  source 1..333: mol_type = other DNA
tgcttttatgacaggatcttacccaacaattcgactgtgctcaacgactatgacagtttcaccttgagagtgagagacattcatctcaacttggacgattgtagactcgacctgtcaaaggacgatccagcaatctgtcggaggcagtcgggttatctgcgtcccgttcttagaaccggtacggagagacctcgacagcccgggctcattgagaatgtcttagctcttatcaagagaaatttcaatgcacctcatcttcttggaactgtagacgtcgatgcaatggccgacaccgtagtggataagttttttaaaattttcttccctgatggt

SEQ ID NO: 26 - protein, 159 aa, Tobacco mosaic virus
MSYSITTPSQFVFLSSAWADPIELINLCTNALGNQFQTQQARTVVQRQFSEVWKPSPQVTVRFPDSDFKVYRYNAVLDPLVTALLGAFDTRNRIIEVENQANPTTAETLDATRRVDDATVAIRSAINNLIVELIRGTGSYNRSSFESSSGLVWTSGPAT

SEQ ID NO: 27 - protein, 159 aa, Tobacco mild green mosaic virus
MPYTINSPSQFVYLSSAYADPVQLINLCTNALGNQFQTQQARTTVQQQFADAWKPVPSMTVRFPASDFYVYRYNSTLDPLITALLNSFDTRNRIIEVDNQPAPNTTEIVNATQRVDDATVAIRASINNLANELVRGTGMFNQAGFETASGLVWTTTPAT

SEQ ID NO: 28 - protein, 159 aa, Tomato mosaic virus
MSYSITSPSQFVFLSSVWADPIELLNVCTNSLGNQFQTQQARTTVQQQFSEVWKPFPQSTVRFPGDVYKVYRYNAVLDPLITALLGAFDTRNRIIEVENQQSPTTAETLDATRRVDDATVAIRSAINNLVNELVRGTGLYNQNTFESMSGLVWTSAPAS

SEQ ID NO: 29 - protein, 157 aa, Pepper mild mottle virus
MAYTVSSANQLVYLGSVWADPLELQNLCTSALGNQFQTQQARTTVQQQFSDVWKTIPTATVRFPATGFKVFRYNAVLDSLVSALLGAFDTRNRIIEVENPQNPTTAETLDATRRVDDATVAIRASISNLMNELVRGTGMYNQALFESASGLTWATTP

SEQ ID NO: 30 - protein, 161 aa, Paprika mild mottle virus
MPYTVSSPNQLVYFGSVWADPIALIDLCTVSLGNQFQTQNARTTVQQQFSDLFKTVPTRTIRFSDGENGFRVFRYNSTLDPLITALLNSFDTRNRIIETENPANPNTAEIASATQRVDDATVSIRACINNLMNELARGTGMLNTASFETVSNLTWTTAATT

SEQ ID NO: 31 - protein, 160 aa, Bell pepper mottle virus
MSYTVNSPSQLVYLSSAWADPTDLLNLCTNSLGNQFQTQQARTTVQQQFSDVWKPTPQAGVRFPASGFKVYRYNAVLDPLITALLGTFDTRNRIIEVENQQNPTTAETLDATRRVDDATVAIRSAINNLANELVRGTGMYNQTSFESMAGLTWTTTPPSG

SEQ ID NO: 32 - protein, 159 aa, Tomato mottle mosaic virus [sequence omitted]

SEQ ID NO: 33 - protein, 158 aa, Odontoglossum ringspot virus
MSYTITDPSKLAYLSSAWADPNSLINLCTNSLGNQFQTQQARTTVQQQFADVWQPVPTLTSRFPAGAGHFRVYRYELILEPLITFLMGTFDTRNRIIEVRNPQNPTTTETLDATRRVDDATVAIRSAINNLLNELVRGNGMYNQVSFETMSGLTWTSS

SEQ ID NO: 34 - protein, 161 aa, Obuda pepper virus
MPYTVTSPSQLVYFGSVWADPITFIDLCTVALGNQFQTQNARTTVQQQFSDLFKTVPTRTNRFNDGENGFRVFRYNSTLDPLISALMNSFDTRNRIIEVDNPANPNTSEVASATQRVDDATVNIRACINNLMNELVRGTGMMNTASFETVSNLTWTTTTTT

SEQ ID NO: 35 - protein, 159 aa, Rehmannia mosaic virus
MSYTIATPSQFVYLSSAWADPVELINLCTNALGNQFQTQQARTVVQRQFSEVWKPSPQVTVRFPANDFKVYRYNAVLDPLVTALLGAFDTRNRIIEVENQANPTTAETLDATRRVDDATVAIRSAINNLVVELIRGTGSYNRSAFESSSGLVWTSGPAT

SEQ ID NO: 36 - protein, 159 aa, Brugmansia mild mottle virus
MAYTITAPNQIVYLGVAYADPILLMNLCTTSQGNQFQTQNARTTVQQQFADIWKAVPAVNIRFPENGFLVYRYNAVLDQLVTSLLNSFDTRNRIIEVENPPNPTNGEIMSATQRVDDATVNIRASITNLMNELVRGTGFLNRSSFESTSGLTWSTAPTT

SEQ ID NO: 37 - protein, 158 aa, Yellow tailflower mild mottle virus
MSYAITSPKQFAYLTNAYADPIALISLCNNALGNQFQTQNARTTVQQQFNDIWKELPTQISRFPVGIYRVYRFDSTIDPLITSVLNSFDTRNRIIETENPANPSTTEVVNATQRVDDATVNIRSSINNLCNELIRGTGFLNQATFEEASQLTWTARTT

SEQ ID NO: 38 - protein, 160 aa, Tropical soda apple mosaic virus
MSYTISNPNQLVYLASVWADPTELLNLCTSALGNQFQTQQARTTVQQQFSDVWKTVPATNIRFPNAGFKVYRYNAVLDSLITALLGSFDTRNRIIEVENPQNPTTAETLDATRRVDDATVAIRSSINNLMNELVRGTGMYNQAQFESVSGLTWATTATSS

SEQ ID NO: 39 - protein, 161 aa, Cucumber green mottle mosaic virus
MAYNPITPSKLIAFSASYVPVRTLLNFLVASQGTAFQTQAGRDSFRESLSALPSSVVDINSRFPDAGFYAFLNGPVLRPIFVSLLSSTDTRNRVIEVVDPSNPTTAESLNAVKRTDDASTAARAEIDNLIESISKGFDVYDRASFEAAFSVVWSEATTSKA

SEQ ID NO: 40 - protein, 162 aa, Cucumber fruit mottle mosaic virus
MSYSTSGLRSLPAYTKSFCPYYALYDLLVSAQGGALQTQNGKDILRDSINGLLTTVASPRSRFPAEGFFVWSRESRIAAILDSLLSALDSRNRAIEVENPSNPSTSEALNATKRNDDASTAAHNDIPQLISALNDGAGVFDRASFESQFGLVWTAASSSTSK

SEQ ID NO: 41 - protein, 161 aa, Kyuri green mottle mosaic virus
MSYSTSGIRSLPAFAKSFYPFYDVYNLLVSAQGGALQTQNGKDILRESLTGLLTSVASLNSRFPANEFFVWSRESRIAAIIDSLLSALDSRNRAIEVENPSNPSTGEALNATKRNDDASTAAHNDIPLLLAALNDGVGVFDSASFESAFGLTWTASATSSK

SEQ ID NO: 42 - protein, 161 aa, Zucchini green mottle mosaic virus
MPYSTSGIRSLPAFSKSFFPYLELYNLLITNQGAALQTQNGKDILRESLVGLLSSVASPTSQFPSGVFYVWSRESRIAALIDSLFGALDSRNRAIEVENPSNPSTGEALNAVKRNDDASTAAHNDIPQILSALNEGAGVFDRASFESAFGLVWTAGSSTSS

SEQ ID NO: 43 - protein, 162 aa, Cucumber mottle virus
MAYSPITPTNLSLFSSNYVPFTEFYNYLVTAQGEAFQTQQGRDSVRDSLSGFFSSPVSPTVRFPDGVFYVFLGNPVLDPLFKALLQSLDTRNRVIEVDNPSNPTTAESLNAVQRTDDSTVSSRVGLINLRAAITQGNGVVNRSIFESSNGLTWATSGSSSSK

SEQ ID NO: 44 - protein, 162 aa, unidentified
MAYTPITPTNLPLFSSNYVPYTEFYNYLVSAQGEAFQTQQGRDAVRTTLSGFFTSPVSPTVRFPDGPFFIFLGNPVLDPLFKALLQSLDTRNRVIEVDNPSNPTTAESLNAIQRTDDSSVSSHVGLVNLRAAIAQGNGVVNRSIFESSSGLTWATSSASTSK

SEQ ID NO: 45 - protein, 157 aa, Turnip vein-clearing virus
MSYNITNPNQYQYFAAVWAEPIPMLNQCMSALSQSYQTQAARDTVRQQFSNLLSAVVTPSQRFPDTGSRVYVNSAVIKPLYEALMKSFDTRNRIIETEEESRPSASEVANATQRVDDATVAIRSQIQLLLSELSNGHGYMNRAEFEALLPWTTAPAT

SEQ ID NO: 46 - protein, 157 aa, Ribgrass mosaic virus
MSYNITSSNQYQYFAAVWAEPTPMLNQCVSALSQSFQTQAGRDTVRQQFSNLLSAIVAPNQRFPDTGFRVYVNSAVIKPLYEALMKSFDTKNRIIETEEESRPSASEVANATQRVDDATVAIRSQIQLLLNELSNGHGYMNRAEFEAILPWTTAPAT

SEQ ID NO: 47 - protein, 157 aa, Wasabi mottle virus
MSYNITNSNQYQFFAAVWAEPIAMLNQCISALSQSYQTQAARDTVRQQFSNLLSAIVTPNQRFPETGYRVYVNSAVLKPLYEALMKSFDTRNRIIETEEESRPSASEVANATQRVDDATVAIRSQIQLLLSELSSGHGLMNRAEFEVLIPWATAPAK

SEQ ID NO: 48 - protein, 157 aa, Youcai mosaic virus
MVYNITSSNQYQYFAAMWAEPTAMLNQCVSALSQSYQTQAARDTVRQQFSNLLSAIVTPNQRFPEAGYRVYINSAVLKPLYESLMKSFDTRNRIIETEEESRPSASEVANATQRVDDATVAIRSQIQLLLNELSNGHGLMNRAEFEVLLPWATAPAT

SEQ ID NO: 49 - protein, 157 aa, Streptocarpus flower break virus
MSYVVVLPNQLQFFTNAWADPIQLMNLCSASLSQIFQTQAARDAVREQFGNTLRSVVTQTTRFPEAGFQVYINDAALKPLWENLLKSFDTKNRILETEEETRPSTAEVLNATQRVDDSTTAIRGALQRLSDELNRGSGYMNRTSFETILLWSAATAK

SEQ ID NO: 50 - protein, 170 aa, Rattail cactus necrosis-associated virus
MPYINVQPKDFVYLTRSWVDPQRLIQFLSDMQTQAFQAQQSRTQLLNELSTMVVYGPTKSDRFPIDTYLINITKGGLSAYWFGLTQSADTKDRVFEVSEARAVTNAESKLATQRVDDATVAIRNAIKSTLSYLIAGEDIYSRTSFEAALGWIWQENLPPPPQTAASDSRT

SEQ ID NO: 51 - protein, 268 aa, Tobacco mosaic virus
MALVVKGKVNINEFIDLTKMEKILPSMFTPVKSVMCSKVDKIMVHENESLSEVNLLKGVKLIDSGYVCLAGLVVTGEWNLPDNCRGGVSVCLVDKRMERADEATLGSYYTAAAKKRFQFKVVPNYAITTQDAMKNVWQVLVNIRNVKMSAGFCPLSLEFVSVCIVYRNNIKLGLREKITNVRDGGPMELTEEVVDEFMEDVPMSIRLAKFRSRTGKKSDVRKGKNSSNDRSVPNKNYRNVKDFGGMSFKKNNLIDDDSEATVAESDSF

SEQ ID NO: 52 - protein, 256 aa, Tobacco mild green mosaic virus
MAVSLRDTVKISEFIDLSKQDEILPAFMTKVKSVRISTVDKIMAVKNDSLSDVDLLKGVKLVKKGYVCLADLVVSGEWNLPDNCRGGVSVCIVDKRMKRSKEATLGAYHAPACKKNFSFKLIPNYSITSEDAEKHPWQVLVNIKGVAMEEGYCPLSLEFVSICVVHKNNVRKGLRERILSVTDGSPIELTEKVVEEFVDEVPMAVKLEKVPENKKEMVGNNVNNKKINNSGKKGFKIEEIEDNVSDDESIASSSTF

SEQ ID NO: 53 - protein, 264 aa, Tomato mosaic virus
MALVVKGKVNINEFIDLSKSEKLLPSMFTPVKSVMVSKVDKIMVHENESLSEVNLLKGVKLIEGGYVCLVGLVVSGEWNLPDNCRGGVSVCMVDKRMERADEATLGSYYTAAAKKRFQFKVVPNYGITTKDAEKNIWQVLVNIKNVKMSAGYCPLSLEFVSVCIVYKNNIKLGLREKVTSVNDGGPMELSEEVVDEFMENVPMSVRLAKFRTKSSKRGPKNNNNLGKGRSGGRSKPKSFDEVEKEFDNLIEDEAETSVADSDSY

SEQ ID NO: 54 - protein, 257 aa, Pepper mild mottle virus
MALVVKDDVKISEFINLSAAEKFLPAVMTSVKTVRISKVDKVIAMENDSLSDVNLLKGVKLVKDGYVCLAGLVVSGEWNLPDNCRGGVSVCLVDKRMQRDDEATLGSYRTSAAKKRFAFKLIPNYSITTADAERKVWQVLVNIRGVAMEKGFCPLSLEFVSVCIVHKSNIKLGLREKITSVSEGGPVELTEAVVDEFIESVPMADRLRKFRNQSKKGSNKYVGKRNDNKGLNKEGKLFDKVRIGQNSESSDAESSSF

SEQ ID NO: 55 - protein, 269 aa, Paprika mild mottle virus
MSSKSIVNIEEFINMSKAEEVLPAALTRMKSVRISTVDKIMATDNDNISEVDLLKGVKLIKNGYVCLVGLVVSGEWNLPDNCRGGVSVCLIDKRMQRHNEATLGSYTAKASKKNFSFKLIPNYSITSQDAERRPWEVMVNIRGVAMEEGWCPLSLEFVSVCIVHKNNVRKGLREKVTTVSEDSAIELTEEVVDEFIEAVPMARRLQNFRKPKNNISKNFVNKGSSKPRNIPKLNEDKVFKLEKGLKGVKGMTNASRDDSSSEISSDSFN

SEQ ID NO: 56 - protein, 278 aa, Bell pepper mottle virus
MAIVVKDKVNVNDFINLSNSEKYLPSNSEKYLPSLMTPVKSVRISKVDKVLARENETLSEVDLLKGVKLIEGGYICLAGLVVTGEWNLPDNCTGGVSVCLVDKRMERASEATLGSYYTGAAKKRFQFKVTPNYSVTTDDAKKNIWQVLVNIKGVRMSAGFCPLSLEFVSVCIVFKNNIKLGLREKITRVTDAGPMELTEEVVDEFIENVPMAARLARFRTKSSKTGPKKFVRNSRDSKVRSNNLNRGVRPKFEEEGIVSDKLINDESESIDADSDSYL

SEQ ID NO: 57 - protein, 268 aa, Tomato mottle mosaic virus
MALTVSGKVRISEFIDLSKSERLLPSMFTHVKSVSVSKVDKVMVNEEDSLSEVNLLKGVKLIDGGYVCLAGLVVSGEWNLPDNCRGGVSICLVDKRMQRADEATLGSYYTGAAKKRFQFKIVPNYAITTKDAERNIWQVLVNIRNVKMAGGFCPLSLEFVSVCIVYKNNIKLGLREKITRVDDAGPIELTEEVVDEFMESVPMSVRLAKFRTKSSKRGPKHNSNNTNERKGRSNFRKKQDQESYGVSDSLDNLIEDDTETSVAGSDSY

SEQ ID NO: 58 - protein, 303 aa, Odontoglossum ringspot virus
MGRLRFVVLLSIFPIKTFSEPCYTMALVLRDSIKISEFINLSAFEKLLPSALTAVKSVRIPKVDKIISYENDTLSDIDLLKGVKLVENGYVCLAGLVVTGEWNLPDNCKGGVSICLVDKRMKRANEATLGSYHTSACKKRFTFKIIPNYSVTTADALKGIWQVMTNIRGVEMEKGFCPLSLEFVSICVVYLNNIKLGLREKILNVTEGGPTELTEAVVDRFVEKVPMAARLKSFRSVNKKKPSNSSKFVNGKSRLNSRNKLNYENGDSDVGTSVVDDIVVGNGVSDIRIDDDCESFDAQSESY

SEQ ID NO: 59 - protein, 274 aa, Obuda pepper virus
MSKAIVKIDEFIKLSKSEEVLPSAFTRMKSVRVSTVDKIMAKENDNISEVDLLKGVKLVKNGYVCLVGLVVSGEWNLPDNCRGGVSICLIDKRMQRHNEATLGSYTTKASKKNFSFKLIPNYSITSQDAERRPWEVMVNIRGVAMSEGWCPLSLEFVSVCIVHKNNVRKGLREKVTAVSEDDAIELTEEVVDEFIEAVPMARRLQNLRKPKYNKEKENKNLNNKNSIGVSKPVGLERNKVRSVVRKGVRSDSSLGVTDMSQDGSSSEISSDSFI

SEQ ID NO: 60 - protein, 267 aa, Rehmannia mosaic virus
MALVVKGKVNIGEFIDLTKTEKLLPSMFTPVKSVMCSKVDKVMVHENESLSEVNLLKGVKLIENGYVCLAGLVVTGEWNLPDNCRGGVSVCLVDKRMERADEATLASYYTAAAKKRFQFKVVPNYAITTHDAMKNVWQVLVNIRNVKMSAGFCPLSLEFVSVCIVYRNNIKLGLREKITTVKDGGPMELTEEVVDEFMEDVPMSVRLAKFRSRTGKKNNVKKVKFEGVDRSVPKMNKGKSRNNGGVFERNIFIDNDSETNVAEPDSF

SEQ ID NO: 61 - protein, 271 aa, Brugmansia mild mottle virus
MTLSIRDSFKIDEFINLSKVEKAVPALFSRVKTVRVSTVDKIMATKNDSLSDVDLLKGVKLVNNGYVCLVGLVVSGEWNLPDNCKGGVSVCLVDKRMKRANEATLGSYHSRACKKNFSFKLIPNYSITTADAEKQPWQVLVNIRGVQMEQGYCPLSLEFVSVCIVHKNNVRKGLRERITNVAEGGSLELTEEVVESFVNDVPMAVRLNHLRNGNKKEGFSKGKYVNNNAKERSVNKFVKKSVNGKGGLKVKEISTSVEDYNSSEVSSDSFI

SEQ ID NO: 62 - protein, 266 aa, Yellow tailflower mild mottle virus
MAIALRDTVKINEFINLSKTEEILPAMFTRMKSVRISTVDKVVAKENDSVSEVDLLKGVKLVKNGYVNLVGLVVSGEWNLPDNCRGGVSVCLVDRRMTRHSEATLGSYTAPACKKNFSFKLIPNYSVTTADAERRPWEVMVNIKGVAMAEGWCPLTLEFVCVCIVHKTNVRTGLREKVTSVSEGSPIELTEDVVDEFFESVPMARRLQNLRNRRGNINRNKSQVYKKKNKNNIGDALKERIDEVKDVENKRYDNDDYSIEESSDSY

SEQ ID NO: 63 - protein, 256 aa, Tropical soda apple mosaic virus
MALVVKDDVKISEFINLSTSEKFLPAAMTSVKSVRVSKIDKVIATENDSLSDVDLLKGVKLIEEGYVCLAGLVVSGEWNLPDNCRGGVSVCLVDKRMLRHDEATLGSYKTGAAKKRFAFKLIPNYSVTTADAKRNIWQVLVNIKGVAMEKGFCPLSLEFVSVCIVHKTNIKLGLREKITNVSDGGPVELTEEVVDEFVESVPMAERLRKFRGRSNKKSNKFVEKNNNKRGDKGGKLLKKIDNETETESSDAESSSY

SEQ ID NO: 64 - protein, 264 aa, Cucumber green mottle mosaic virus
MSLSKVSVENSLKPEKFVKISWVDKLLPNYFSILKYLSITDFSVVKAQSYESLVPVKLLRGVDLTKHLYVTLLGVVVSGVWNVPESCRGGATVALVDTRMHSVAEGTICKFSAPATVREFSVRFIPNYPVVAADALRDPWSLFVRLSNVGIKDGFHPLTLEVACLVATTNSIIKKGLRASVVESVVSSDQSIVLDSLSEKVEPFFDKVPISAAVMARDPSYRSRSQSVGGRGKRHSKPPNRRLDSASEESSSVSFEDGLQSDHT

SEQ ID NO: 65 - protein, 258 aa, Cucumber fruit mottle mosaic virus
MSISKVGVRNALKPEEFVKITWVDKLLPDAFTILKYLSITDYSVVQSKDYEHLIPVDLLRGVDFSKSKYVTLVGVVISGVWTIPENCAGGATVALVDTRMSLVSEGTICKFSVSAASRDFTVKLIPNYYVTAADASSKPWSLFVRISGVRIKDGFSPLTLEIASLVATTNSILKKGLRVSVIESVVGSDASVSLDTLSEKVQPFFDSVPITASVVSRDRSYVSKGRPPSRSGPVSRKSKSKSEAESFSDSGASEPLSS

SEQ ID NO: 66 - protein, 262 aa, Kyuri green mottle mosaic virus
MSVSSVGVKNALKPQEFVKLSWVDKVLPDMFTVFRYLSVTDYSVIKSRDSECLIPVDLLRGVDLSKSKYVTLVGVVISGVWTIPENCAGGATVALVDTRMSMVDEGTICKFSVAASTRDFMVKLIPNYYVTASDASSKPWSIFVRVSGVRIKEGFSPLTLEIASLVATTNSILKKGLRVSVLESVVGSDASINLDSVSDKVQPFFDSVPITAAVIARDRSYVSKSGPSRAVRPRPQSKSGKKGDANPAESMSDGDAYEPPRL

SEQ ID NO: 67 - protein, 261 aa, Zucchini green mottle mosaic virus
MSVSKLGVKNVLKPQEFVKLNWVDKVLPDMFTVFRYLSVTDYSVIKSRDSECLIPVDLLRGVDLSKSKYVTLVGVVISGVWTIPENCAGGATVALVDTRMSMVDEGTICKFSVAASARDFMVKLIPNYYVTATDASSKPWSIFVRVSGVRIKEGFSPLTLEIASLVATTNSILKKGLRVSVLESVVGSDASVNLESASEKVQPFFDSVPITAAVISRDRSYVSKSGFNRAVRSKPPSKGGKKFGDSAESLSEDSASELPGL

SEQ ID NO: 68 - protein, 262 aa, Cucumber mottle virus
MSISNLSVESQLKPSNFVKLSWVDKLLPDYFSILRFLSVTDHSVIKAREYESFLPVELLRGVDLTKHKYVTLLGVVISGVWTIPEGCSGGATVGLVDTRMERVVEGTVCKFSVPASVREFNVRFIPNYSITAADAARHPWSLFVRLKGVNIKDSFSPLTLEIAALVATTNSIIKKSLKAIVSDVVVGSDAAVAIADRDSQVNSFFDSVPITKSVVNFDKSYKSRVPKKDSSGGSGKVKRSTGTSGPADTEFSDDGLLSNHSD

SEQ ID NO: 69 - protein, 262 aa, unidentified
MSISNLSVESQLKPSNFVKLSWVDRLLPDYFSILRFISVTDHSVVKAREYESFLPVELLRGVDLTKHKYVTLLGVVISGVWTIPEGCSGGATIGLVDTRMERVSEGTVCKFSVPASVREFNVRFIPNYSITASDAARHPWSLFVRLKGVSIKDSFSPLTLEIAALVATTNSIIKKSLKAVVSSVVVGSDAAVAIEDKDSSVNSFFDSVPITKSVINFDKSYKSKVPRKGSSVVSVKGKAGVGTSGPTDTEFSDYGLHSDHTD

SEQ ID NO: 70 - protein, 267 aa, Turnip vein-clearing virus
MSIVSYEPKVSDFLNLSKKEEILPKALTRLKTVSISTKDIISVKESETLCDIDLLINVPLDKYRYVGILGAVFTGEWLVPDFVKGGVTISVIDKRLVNSKECVIGTYRAAAKSKRFQFKLVPNYFVSTVDAKRKPWQVHVRIQDLKIEAGWQPLALEVVSVAMVTNNVVMKGLREKVVAINDPDVEGFEGVVDEFVDSVAAFKAVDNFRKRKKKVEERDVVSKYKYRPEKYAGPDSFNLKEENVLQHYKPESVPVLRSGVGRAHTNA

SEQ ID NO: 71 - protein, 267 aa, Ribgrass mosaic virus
MSMVSYEPKVNDFLFLTNKEKILPKALTRLKTVSISTKDIISVKESETLCDIDLLIDVPLDKYRYVGILGAVFTGEWLVPDFVKGGVTISVIDKRLVNSKECVIGTYRAAAKSKRFQFKLVPNYFVSTADAKRKPWQVHVRIQDVKIEAGWQPLALEVVSVAMVANNVVMKGLREKIIAISDPDVEGFEGVVDDFVDSVEAFRAVDNFRKKKRKIGEKEAVSRNKYRPEKHAGPNSLYIKEENVLQHHELESVPVLRSGVGRTHTNA

SEQ ID NO: 72 - protein, 267 aa, Wasabi mottle virus
MSTVSYKPKVSDFLSLSRTEEILPKALTRLKTVSVSTKDVISVKESESLCDIDLLVNVPLDKFRYVGILGVVFTGEWLIPDFVKGGVTVSVIDKRLENSKECIIGTYRAAAKDRRFQFKLVPNYFVSVTDAKRKPWQVHVRIQNLKIEAGWQPLALEVVSVAMVTNNVVVKGLRERVIAVDDPNVEGFEGVVDEFIDSVAAFKAVDNFRKKKRKIGGRDVISKYKYRPEKYAGPDSLLNKEENVIQHHELESVPVFCSGMGRAHSDA

SEQ ID NO: 73 - protein, 265 aa, Youcai mosaic virus
MSYEPKVSDFLALTKKEEILPKALTRLKTVSISTKDVISVKESESLCDIDLLVNVPLDKYRYVGVLGVVFTGEWLVPDFVKGGVTVSVIDKRLENSKECIIGTYRAAAKDRRFQFKLVPNYFVSVADAKRKPWQVHVRIQNLKIEAGWQPLALEVVSVAMVTNNVVVKGLREKVIAVNDPNVEGFEGVVDDFVDSVAAFKAIDSFRKKKKRIGGRDVNSNKYRYRPERYAGPDSLQYKEENGLQHHELESVPVFRSDVGRAHSDA

SEQ ID NO: 74 - protein, 288 aa, Streptocarpus flower break virus
MAIVLSKPKVSEFLNLTKAEEILPKFLTRLKTVAISTRDVVSVKGTTDLVDIDLLRDVPVNNWRYVGIVGIVASGEWLLPDNVSGGVAISFVDKRLVDSREAILGTYRAAAVEKRFQFKLIPNYFVSQEDALRRPWQVQVSLKGLKFEEGFSPLTLEFVSVVVCANSVVTKGLRERLNNVGDPNVEVSEVVVDEFVDSISASQSLSRARNKYVRGNGKVGNNSGGFSKYNRHQPERFAGKAMYNSKNVVRGGTSEPTAILHKRMGGSNSIDESLFSVAESDLSDSGCA

SEQ ID NO: 75 - protein, 334 aa, Rattail cactus necrosis-associated virus
MSSLCVSDPAVLLSPELHLKVPQLKSLVQFWKKPFKTCSISMSDVIKVASSNPLSIAVDFSSAMPSGPRNFKYVYILAVVLTGRWHLSESCPGGATFVLYDKRLCGRAEGIYGSFFSKVSASKFQVRFSVGHSMTVNDLLRNPLHLCFSLESVPCQEGYEPLSVEVSSLQLFTDCILEESLSAKLVKYPALCTDNMSVISNVDDVIFKFNSVLNVDNVPNSVKNVVKCNKVFKGRRSRGKWVGSQNEVVVKDGTNVTPHRLIAKDALHQRTTERLRLPDQVMGRPPASDTVSERYADSGFPSTAVSHTTSERTVDDGGLRSDQIGPFPYRYVPY

SEQ ID NO: 76 - DNA, 4759 bp, Arabidopsis thaliana
  source 1..4759: mol_type = genomic DNA
ttcattcatcatcttcctcctctctctcttctctgtatcacccaactaaatcctcacgggattagatccaaagtctcaaactttgatccaaaaacacaaactttgttcaaaagacataaactttgagccaaagtcacaagctttcttggtgaacgatggattacaatccaaatcttcctcctttaggaggaggtggtgttagtatgagaagaagcataagtcgaagtgtaagcagagcaagtaggaacattgaagatatcttctcatctggttcaagaagaacacaatcagtcaacgacgatgaagaagctcttaaatgggctgccattgagaagctaccaacttacagtcgtctccgaaccactctcatgaacgctgtagtcgaagacgatgtttacggtaaccagctcatgagcaaggaggttgatgtaaccaagcttgatggtgaagatcgtcagaagtttattgacatggttttcaaagtagctgagcaagataatgaaaggatcttgactaagctaagaaacaggatcgatagagttggtatcaaacttccaactgttgaagtcaggtacgagcatttgacgattaaagctgattgttacactggtaatagatctcttcctacacttttgaatgttgtgaggaacatgggagagtctgctttaggtatgattggtattcaatttgctaagaaagctcagcttacgattcttaaagatatctctggggttattaaacctggaaggatgacacttttgttgggtcctccttcttctggtaagaccactcttttgttggctttagctgggaaacttgataaatctctacaagtcagtggtgatattacttacaatggttaccaactcgatgagtttgttccgagaaagacctctgcttacattagtcagaacgatcttcatgttggtatcatgactgttaaggagactcttgacttctctgctaggtgtcaaggtgttggtactcgttatgatctgttgaatgagcttgcgaggagagaaaaggacgctggtatattcccggaagccgatgttgatctcttcatgaaagcttctgctgctcaaggtgttaagaacagtctcgtcactgattatactctcaaaattttggggcttgacatttgcaaagacacaatagttggagatgacatgatgagaggtatatctggaggtcagaagaaacgtgtcacaactggtgagatgattgttggacctactaagacactcttcatggacgaaatatccactggtcttgacagttccactactttccaaatcgtcaagtgtctgcaacaaatcgttcacctcaatgaagccacggtgctcatgtctctcctccagcctgctcctgagacttttgatttattcgatgatatcatcttggtgtcggaaggtcagatcgtgtaccaaggaccgagagacaacattcttgagttctttgagagctttgggttcaagtgtcctgagagaaaaggaacagctgatttcctgcaagaggttacttccaagaaagatcaagaacagtactgggtgaacccgaacagaccttatcactacattccggtttcagagtttgccagtagatacaagagtttccatgttgggacgaagatgtctaacgaacttgcagtaccgttcgataagtctcgcggccacaaagcagctcttgtgttcgataagtactctgtctcaaagagggagcttctcaagagctgttgggacaaagagtggctgcttatgcagcgaaacgcgttcttctatgttttcaagactgtccagatcgtcatcattgctgcaatcacgtctacactcttcctgagaaccgaaatgaacacaagaaacgagggtgatgctaatctctacataggagcattgctatttggaatgatcatcaacatgtttaatgggtttgcggagatggctatgatggtttcaagactccctgtgttctacaaacagagggatctcttgttttatccatcctggaccttctcacttcccactttcttgcttgggattccaagctcaatattagaatcgacggcttggatggtggtgacttattactccattggttttgcacctgacgccagccgcttcttcaagcagtttcttctggtgtttctgattcaacaaatggctgcatccctctttaggttgattgcttctgtgtgcagaaccatgatgattgctaatactggtggtgctctcactctacttcttgtgttcttgctcggaggcttccttcttccgaaaggcaagattcctgactggtggggttgggcttactgggtatctcctctcacctatgctttcaacggtctagtagtcaatgaaatgtttgctcccagatggatgaacaaaatggcttcttctaacagcacaataaagcttggaactatggtgcttaatacttgggatgtctaccatcaaaagaactggtactggatttcagttggagccttgctttgtttcacagccctcttcaacattctattcaccttggcacttacctatctcaaccctcttgggaagaaggcaggtttacttccagaagaagaaaatgaagacgctgatcaggggaaagatccaatgcgtagatctttgtctactgcagatgggaacagaagaggagaggtcgcaatggggagaatgagtagggactctgcggctgaagcatcaggtggtgcaggcaataagaaaggaatggttcttcctttcactcctttagctatgtcctttgacgacgtcaaatactttgttgacatgcctggggaaatgagagaccaaggagttacagaaacaagactccaactgcttaaaggtgtgactggtgcatttaggccaggagttttgactgcgcttatgggagtgagtggtgccggtaagactacgcttatggacgttttggccggaaggaaaacaggtggatacattgaaggagatgtgagaatatcaggattcccaaaggttcaagaaacatttgctagaatctcaggatattgtgagcagaccgatattcactccccgcaagtaacagtcagagaatctctgattttctctgctttccttcgtcttcctaaagaagtcggcaaagatgaaaaaatgatgtttgtggatcaagtgatggaattggtagagctggacagtcttagggactccattgttggtttaccgggtgtcacggggctttccacggagcagagaaagagactgacaatcgcggtggagcttgtagccaacccttccatcatctttatggatgagccaacttcagggctagacgctagagcagcggctattgtgatgagggcggtaaggaacacagtggacactggaagaaccgtggtctgcaccattcatcagcctagcattgatatctttgaagcatttgatgaattgatgctgatgaagagaggaggacaagtgatttacgcgggtccattgggtcaaaactctcacaaggtggttgagtactttgaatctttccccggagtgtccaagattccagaaaagtataacccggccacttggatgctcgaagctagctcactcgccgctgagctaaagcttagtgttgactttgctgagttatacaatcaatcagcattgcaccagcgaaacaaagcgttggtaaaagaactaagtgtaccaccagcaggagcatcagatctttactttgctacacaattctcacaaaacacatggggacagttcaaatcatgcttatggaaacaatggtggacgtattggagatctccagactacaatcttgtccgtttcatcttcacattggcaacatctctcttgattggtacagtcttctggcaaatcggaggtaacaggtcgaacgcaggggatctaacaatggtgataggagcattgtatgccgcgattatcttcgtgggaatcaacaactgttcaacagtacaaccgatggttgcagtggaaagaacagtgttctacagagaaagagcagcaggaatgtactcagccatgccatatgccatctctcaagtcacttgtgagcttccctatgtccttattcaaaccgtttactactcactcatcgtctacgccatggttggtttcgaatggaaagccgaaaagttcttctggttcgtcttcgttagctacttctcattcctctactggacttactacggcatgatgactgtttccctcacaccaaaccaacaagtcgcttcgattttcgcctcagcgttttacggtattttcaacctcttctctggtttcttcattccaagacccaaaatcccaaaatggtggatttggtactactggatctgccctgttgcatggaccgtgtatggattgatagtgtcgcagtacggtgatgtggagacacgtatccaagtccttggtggtgctcctgacttaaccgtcaagcaatacattgaggaccattatggtttccaatctgactttatgggaccagtggcggctgtactcatcgctttcaccgtcttcttcgccttcatcttcgccttctgcatcagaactctcaacttccagaccagataaaaccatctctcaaacaacaaagtctctttctttttttgtatcctctgtgttgtttatatgcactataagctttgtatgttctaaatatgtattgtagtgtcataacgaaatttttttgaatatttttatttattgtcttatagatgatgacgaatcggaatcatgtaatataattccacttttttttgtgttta

SEQ ID NO: 77 - DNA, 1642 bp, Arabidopsis thaliana
  source 1..1642: mol_type = genomic DNA
gcttcacgagacaaacgacgaacaacgcaattacgcgttcttatctttctgggtatttcttaattatattactctatataaataaaaatacccagaaacgtaatttcgtcgagttcaaaaattcaattcaaagaataatttctttccataaaaagattgttgtggattaacttctttcttaaaagaatctcatacccgtcgaatcttcttcttcaacctttttctgcgtttttaatattttccctacaaaaagattctcaaaatcgttttacataaacccgatcttgtcaatctccagaaacaaaaaaaaaaaaatggcgatcaagacaaagactagtctaattccaagttgttcatcacctgaggatctaaaacgcgttttgcaaacgctaggttcgagctggggagatgtagttgaagatctggagcgtcttgaggttgttccgttaaaaggagctatgactaacgaggtttatcagattaattggcctactttaaacggtgaagatgttcatcggaaagttcttgttcggatctacggtgacggcgttgaccttttctttaacagaggtgatgaaatcaaaacgtttgagtgtatgtctcatcatggttatggtcctaagcttcttggtcgtttctctgatggtcgtcttgaagaattcatacacgccagaactctttctgcagatgatcttcgtgtagcagaaacatctgatttcatcgctgcgaagctaagagagtttcataagcttgatatgcctggtccaaagaacgttcttctctgggaaagacttaggacttggcttaaggaggctaagaacttggcttcacctatagagatggataagtatcggttggaaggtttggaaaatgaaatcaatttgttggaagagagacttactcgggatgatcaagagattggtttctgtcacaacgatcttcagtatggaaatgtcatgattgatgaagtaaccaatgccattaccatcatagactatgagtattcgagtttcaacccaattgcttatgacattgcaaaccacttttgtgagatggctgctaattaccattcagacactcctcatgttctggactacactctatatccaggagaaggagaaaggagaaggttcattagcacatatcttggctctacagggaatgcaacaagtgataaagaagtagagaggttattgaaagatgcagagagctacactttagcaaaccatatcttctggggactatggggaatcatctcgggacatgtgaacaagattgagttcgattacatggaatatgcaaggcagagatttgaacagtactggcttagaaagcctttgcttcttgaaggatgaagcagattcgcattgaaaagccgatatacaactaaaagtttctgcaattaggtcaaaagaaaaaaagaaaatttagtagactatatgttgctattgttactctcatcagtttgtgtgtttcttcccttctatatagaggtttgttaactctcaaaacagttaaattgagtaaaacttgttctaaacaaagtattatatgataatagaagaagcaccagtggtctagtggcatgatagtaccctgccacggtacagacccgggttcaattcccggctggtgcaattta

SEQ ID NO: 78 - DNA, 1043 bp, Arabidopsis thaliana
  source 1..1043: mol_type = genomic DNA
agtttcaaattagtaaacgataaagtagatgataattaaattcatgtcatagccatgaacgaatgttatgttaaaaaaatttcatgtaagtaaattctttggagttcgattcttcttttgtccttacacaatcaaagatttttctttcaactttttttacttaacagcattaactctttctcagatcttcaattgttttcctaaacgaaattatcattaaattgtttaaaaaatacacatttaatataacatatatcataacaagatatattatatttatgaaaaagagatgtagtactacagcatatggtggcaaacaaacccactaaattcagtaaaatggaacccaccaaatttatctataaataagtccccaaacctctcccccaaaaatgcaacaacactcatctttcccaatataagtttttaccaaacaacaacttttgttttgcctttcctcaaaacataattttgtcttattttctaaaccggtaaaagatgtcgctagctatcgcagaagtttacacggtgaggaagtttcacagagagagtatgaagaaaccggccaaacagacggttaccggcgagggagatgaaaagattggcggaggaagtttcaaggaggcgccggtgaagtcaggtgggtgtagaagattcggacggtggttttttgggaagccgggaatgaagaaaagctctgctaaagtttcggatcccatggcgattgagtgatgaagaagaaattaaaacttttctcttctttgccttttttttttttctttctttattttgttttattttcattggtctttttttaatggctttttctagtgtcttctctttttctttattgggtgattttataaatagtcggtaaacattgtacaatatgaactacaaaaatatgagaaaatctatatatgtatgtagaatggatgtattccctaaataccacagctagtttgataagttttatgccaaaccaactaaacttgtatgccacgatatttcgtatttcagaaaatcgaaaattgttatttttt

SEQ ID NO: 79 - DNA, 1428 bp, Arabidopsis thaliana
  source 1..1428: mol_type = genomic DNA
acaaaaaccatttgaattttctttcttcttcaaaagttcgaaacttttttttttccggcaatggagggactagttccggtacagagacttccaattaaagtggcttcaccttctctgtatcggtgtaacaattctgtctcaatcagacgttcaatttcaggttttgccatggacaggaagataaactttagggctccgtcgcaattctcgatccgagctcaacagtcggatttgaaggaaagcttagctgtgtcttcttcatcagtagaggataaaggaaatgttcttagaatcaaggaatgggaagtagagatgtatcaggaggaattagctattagtcaaggtattaggataaggagaaaaccaccaagtaaggctcctttgggatactctggaccatttgagttgagattgcataacaatgatgctgattctcctcgtaatatcttggaggagatcacatggtacaaagacgtagaagtttcccggatgaaggagctaaatccgcttgacgtgctgaagaaagctgtagaggatgctcctcctactagggattttgttggggctcttaggatggctcataaaagaactggcttccctggcttgatagctgaggttaagaaggcttctccaagtagaggaatcttaaaagagaattttgacccggtcgagattgctcaagcttatgaaaaaggcggagcagcatgcctcagcgttttgacagaccagaagtatttccagggaggctttgaaaacttggaagcaataaggagcgctggtgtgaagtgtccactattatgcaaagagtttgttgtagatccatggcagatctactatgctcggactaaaggcgcagatgcagtactgcttattgctgctgtattggctgacctagaaataaccttcttgcttaagatttgcaagaagcttagcttggctgcccttgttgaggtacatgatgagagagagatgggtcgtgtacttggaatagaaggaatcgagcttgttggcatcaataaccgaagtcttgaaacatttgaagtggacatcagtaatacaaagaagcttcttgaaggagagcatggtagacaaatccgtgagagagacatgattgtggttggcgaatctggtctgtttacaccagatgacattgcctatgtacaagcagccggagtcaaagcagttttggttggagaatccattgtgaagcagaacgaccctgagaaaggaatagctggactttttggcaggaacatttctcatacttagagaccatatcataatacatctccaaatacgtttcctagtacatttgttttgtatcttgctctgtgagtattgaggaaagactagaaaggtttgttggttctgatgtttaagacattttcaaaaaaccatcgaataaactgaatcgaaatcgatttacag

SEQ ID NO: 80 - DNA, 1388 bp, Arabidopsis thaliana
  source 1..1388: mol_type = genomic DNA
agataagagcgaaacaaattacaaaattgaattacacaataatgtcctctaagcgacgactaccggtgaaatattttataagaaaacaaaaacaataattaacaaacaaaggcgacacctttagattcgacaagacgaccattttagaaaaagcttctcaaattctctccttatccccaaaaattcaaacttttttctctttggaaaattctgaggcaaaaatgcggcgtaattgctgccatgtttcatttgcttcaaccctcaagatccttaattttgtccaagctttcattggtgtttcgatcattatctactccatatggatgctccatgaatacagccgtcaccttcccgtggacccgcctccgtcagcttcatcaagctccggaaccgagatcgctactagtgtatctgagcccttgaagaatcctattgattttgtggcgagtatcattctcgggtctaatggtggtgatcatgggtttaacctacgctcgttggaccttcctgctccatggttcatctactctttcatggcggttggtatattggtctgcattgttaccttcattggtttcatagcagctgaagcaatcaatggctgttgcttgtgtttttactctattctcaaaactctgctcattctacttgaagctgcacttgttgcatacatcgctattgaccgtcactgggaaaaggatcttccgtatgatccaactggagaacttagtagtcttagggctttcattgaagaaaacatcgatatatgcaaatgggtggggattgctgtggtagcagtccagctactgtcattgctactagccatggttctcagagcgatggtttcaaccccgaaacccgaacttgacgaagaggaagatgatgagaacccaaggagtagaacttgggacccacttcttggtccgcaaggaaaccaagcgcctgctggctcaagcaagattgaaaactggagctcccgaatcagagaaaagtatggtttgaaccagagtccaccggtgaacccgaaaggttgatgaagccaaataatcatgtttctaaaactgcatgtgtccatatggtctctgtgaagctctctttctctatgttttgctctttgcaacttctcgagtgtgcataaacatttactcaaaacagtgctgtattgtgtttacacaaacggcataagcatcttcgtttgtgtgtttgcttgtacaaacaatcctgtgaacagtttgaagttagcatttccactataacgtttcgattcaatttataatgaagaaaacaaaactaaaaattgaattggacatcataaacagattaatgtaaaatgtatatgtaggttaaactctttcttagattatatcatctatatatgtttcattatt

SEQ ID NO: 81 - DNA, 1145 bp, Arabidopsis thaliana
  source 1..1145: mol_type = genomic DNA
gactccattattatccctctctctacaaaaaaaacagtagagagagatatagagagcatcaatggcgtcgtcgtcaagactttgcgattcgtgcaaatcgacggcagcaactctattctgccgcgcagacgccgcgtttctctgcggcgactgcgacggtaagatccacacagctaacaaactcgcatcacgtcacgaacgagtttggctatgtgaagtatgcgaacaagcaccagcacacgtcacgtgcaaagctgacgccgctgcgttatgcgtcacgtgcgaccgtgatatccactcagctaatccactctctcgccgccacgagcgcgtaccaatcactcctttctacgacgctgtaggtccagcaaaatccgcttcctcctccgtcaatttcgtagatgaagatggcggtgacgtcactgcttcgtggcttttagctaaagaaggaatcgaaatcactaatttgttctccgatcttgattatccgaagattgaggtaacgtcggaggagaatagctccggtaacgacggagttgttcctgtgcagaataagttgtttcttaacgaagattacttcaatttcgatctctctgcttccaaaatttctcaacaaggattcaatttcatcaaccaaactgtttcgacgagaacgatagatgtaccgttggtgcctgaaagtggaggagtgacggcggagatgacgaacacggagacgccagctgtgcagttatcaccggcggagagggaagcaagggttttgaggtatagagagaagaggaagaatcggaaatttgagaagacgattaggtatgcgtcgcgtaaagcttacgctgagatgaggccgagaatcaaaggacgttttgctaagagaacagattcgagagagaatgatggtggagacgtcggagtttatggcggattcggtgttgttccgagtttctgatattttccggtgaaagaaacatggtagtagtatatcggttaatagcagattaaggataattaaaactaaaatgtttcctgatttaatcaggggctaagttattgttagaagattgttgttttttgaattaattctcacaattgtatcctaaattatatagtttacttaatgttgaactaataaattttgatttacaatc

SEQ ID NO: 82 - DNA, 2268 bp, Arabidopsis thaliana
  source 1..2268: mol_type = genomic DNA
atggcggaatcaagctctcctctccctcctctttgtgaaaggatctcacacaaaagctatttcttaagagctgtggatctcactattctaggtcttctcctttctcttctattgtaccgtatcctacatgtgaaccaaaaggacaccgtttggatcgtggctttcctctgtgaaacttgtttcaccttcgtatggttgcttattaccaacataaaatggagtcctgctgattataaaacatatcctgaaagacttgatgaaagggttcatgaacttccaccggtagatatgttcgtgaccacagctgatccagtaagggagccaccgcttatcgttgtaaacacagtgctttcactgttagctgtgaattatccggcgaacaaactagcttgttatgtgtcggacgatggatgttcacctctcacttacttctctctcaaggaagcttctaagtttgccaagatttgggttcctttctgcaagaaatacaacgttagagttagagctccttttatgtacttcagaaactctccggaagcagcagaaggttctgaattcagtaaagactgggaaatgactaagagggagtacgagaagttaagccagaaagtagaagatgccactggaagttcccactggttggatgcagaagatgactttgaagctttcttaaacacaaaatcaaatgatcattcaactatagttaaggtggtatgggaaaacaagggaggtgtgggagacgaaaaagaggtccctcatgttgtttacatttcaagagagaaaagaccaaatcactttcatcattacaaagctggagccatgaactttctggtaagagtgtcagggttgatgacaaatgcaccatacatgttgaacgtagactgcgacatgtatgtcaatgaagcagatgtggtgcgacaagcaatgtgtatatttctgcaaaaatcaatggattcaaaccattgtgcttttgttcaataccctcaagatttctatgattctaatgtcggtgaactcaccgtcttacaattatacttgggacgaggaattgcgggaatccaaggacctcagtatgcgggttcaggatgcttccatactagaagagttatgtacggtctttctctagacgatttaggagacgatggaagtctttcttcaattgctacaaggaagtatttagctgaggagagtctaacgagagaatttgggaattctaaggagatggtgaaatcggtggtcgatgcgttacaaagaaaaccatttccccaaaaaaaccttaaggactctctagaaacggctcaagaaatgggacattgtcactacgagtaccaaaccagctggggaaaaaacatcggttggttatacgattcaacaacggaagatgtgaacacgagtatcggaattcattcgagagggtggactagctcatatatttttccggatccaccggcgtttcttgggtgtatgccacaaggaggaccggaggtaatggttcagcagcgacgatgggccacgggactgctcgaaatccttttcaacaaacaaagtccgttgatcggaatgttttgtcggaaaataagatttcgacaaagcttggcttatttatacgttttcagttggggtctaagatcaatccctgagctcttttactgtctcctgcctgcttattgcctactccacaactctgctttatttcccaagggagtttacttaggtataatcatcacacttgtggggatacattgtctttacactttatgggaattcatgaaccttggtttttccatacaatcgtggtatgtcactcaatcatttgggaggataaaaacaacttgtagttggttatttagcgtccttgatgtcatactcaagcttcttggaatatcgaaaaccgtcttcatagtcactaaaaagactatgcctgagaccaagtcagggtctggatccaaaaaatctcaacgagaagttgattgtccaaaccaagattccggtaaatttgaatttgatggctcgctttatttcttgccgggcacattcattgtgttagtgaatctagccgctctagccggttgtttggtgggtctacaaagtcgcggaggaggtggttcgggtttggcagaagcctgtggctgtattttggtggttattttgttccttccatttctaaagggtatgtttgagaagggaaaatatggtatcccattttctactctttctaaagctgcctttttagcagcgttatttgttgttttatctgtgggaaactag

SEQ ID NO: 83 - DNA, 1381 bp, Arabidopsis thaliana
  source 1..1381: mol_type = genomic DNA
catatttatactactagtatataagttaagggtttaagcctcttctcttccttctttctcttagccatcacatcgataatggcttctcttctaacaaaacccaaacccgttttcctctgttcaccatcgttatctccaagaactttgaacacagcaacaccgtcattgaatttcaccagaatttcattcacccatcaccaaaagcttgctcctttcaagcctcctagtctcgttgttgcattctctgaaaagggtttgaagagagatgtcaccacagctgctgcagcgacggagggagattacagaaggataatgttatctgatgtgttggtgaagaagaaggaaaaagtagtttggtgggagagagaatggaaagctatggactttggagctgttgctgtcgttttgtctatgcatttgcttagtcttttggctccgtttcaattcaattggagagctgtttcggttgcttttgggctttatatcgttacaggtcttctggggattactctgtctttccataggaatctttctcataaagccttcaagctacctaaatggcttgagtacttgtttgcttattgtggagctcaagctcttcagggaaacccaattgattgggtgagtacacataggtaccatcatcagttttgtgattcagacagagaccctcatagcccacttgatgggttttggttcagtcacatgaattggatgtttgataccaatacaatcacccaaaggtgtggagagcctaataatgttggggacttggagaagcagccattctatcgattccttcgaaccacctacattttgcatccgctggctctagcggttgctttatacgcaatgggtggctttccattcatcgtttggggaatgggtgtaagaatagtatgggtatatcatataacttggctagtgaactcagcttgtcatgtatggggaaaacaagcatggaacacaggcgatttgtctaagaacaactggtgggtagcagctctagcattcggggaaggatggcacaacaatcaccatgcttttgagttctcagctcgacacggcttagaatggtggcaacttgatatgacttggtacgtcgttaagttccttcaagccatcggtttagcaactgatgtcaagctcccatcggaagctcagaaacaaagaatggcattcaccagcgactgatcttaaaaaactacatggttatgcctaaagtcaaaactgtcggttcgattgaagctatgaaggttttaaaaaaggattttgttctgcttttttgtgtttacttaaaggtatatatctgtgcaagagattgtatgtgacaaactgattatgaataatatctataattacattcaatacaaaaggaagc

SEQ ID NO: 84 - DNA, 980 bp, Arabidopsis thaliana
  source 1..980: mol_type = genomic DNA
aaatcactcaccacataaagtaaaagtctcatctcttcataaaatagctttaaaccaatcaagtagagtttcttctcaagtctttttattttatttttatcaatggcttcttcagcagtgtctctccaatccatctctatgacaactctcaacaatctttcatgtaatcaacaatttcatcgaagctctcttcttggttcctctaaatccttccaaaatcttggtatctcatctaacggttcagatttctcctatccatcaagtttcactgccaagaagaacctcactgcttctcgagctctctcccaaaacgggaatatcgaaaaccctagaccaagcaaagttcaagaactgagtgtgtacgaaatcaacgaattagatcgacacagccccaagattcttaaaaacgcattcagcttaatgttcggtctcggagatctcgtaccattcacaaacaaactctacacaggcgatctcaagaaacgcgtgggcatcacggcaggtctctgcgtcgtcatcgaacacgtcccagagaagaaaggtgaaagattcgaagctacttatagcttctacttcggagactatggccacttgtccgttcaaggaccatacttgacttacgaggattcgttcctcgccatcactggtggtgctggaatctttgaaggtgcctacggacaggtcaagcttcaacagcttgtgtatccgacaaaactgttctacactttttaccttaaagggttggctaatgatttgccgttggagctcaccggaacaccggtaccgccgtctaaggacatagagccggcgccggaagctaaggcactggagcctagcggagttataagtaactataccaactaattcatgaaattaaaatgtttctcgtatcgctgtgtaatgatataaagatttgtagttttgtgctcttatctgtaataaaatcattgaggaataatatctcgagtatgttttaagtc

SEQ ID NO: 85 - DNA, 2706 bp, Arabidopsis thaliana
  source 1..2706: mol_type = genomic DNA
ccggttacagctacaccgccgttttctctctccgccgtcttttctcttcttctccgactgaatctgtgaaggtgaatttcggagttgagaaagagagattagcgtgtaatggcgatcgataatggcaagcttcaagaagaagaagcctcatctgttactcgattctataacattattttgggttgggactataaacagcttactaaagagaatgagaggaaaaatagaaaggattctaaagagaaattgaatgttgtaaagaatacttataaagatgttgatgattatttcgagacttttgaaccattgctcttcgaggaagttaaagctcaaattttgcagaataaagatggtgaagaagcatcggtgtgtaaaatgagattggtaatggagtgcaacgagggcgaagggtttcactttctgttagtcacatacgaacatgaggaggatgaatatcttgctcaaaatgatcttttattgctatcaaaagaagaggttaaagggaattcatttccttcatcttatgggtttgctgtagtggaacatcgtcaaaataatcttcttcgtcttcggatgtatttagctgaagacattgtgcagataaccaagaatactaaatcctctagaacaaagtcatttatccaagcgctttcaaatatgcgttctcttattacatcatctgccagccctattgacaaaagggtattcagtttaaagttatgtggtttatcaaccattattcgggaatatatagcactacgatcagttagttcgctccctttcaaggatttaatcttcactgcagcagaaaaatcttgtggttttggagatgaagcatggaaaatatctggacctctgaatgaattctttaacgaaaaccttaacaaatcccaaaaggaggcaattgatgttggtctatcaagaaaatccttcgtcttaatacagggtcctccaggtaccgggaaaactcagacgattcttagcatacttggtgctattatgcatgctactcccgcaagagtccagtctaagggtacagatcatgaagtaaagcgtggtattcagatgactatccaggaaaaatacaatcactggggaagagcctctccttggattttgggtgtcaaccctcgagatgctattatgcctgaagatggtgacgatgggttctttccaacctcaggaaatgaattgaaaccggaggtggttaatgcgagtcggaagtacagattacgtgtacttgtctgtgctccatcaaactctgcacttgatgagattgtgttgcggcttctgagttcgggtcttcgtgacgaaaacgcccagacatatacacccaaaatagtacgaattggtctcaaggctcatcactctgttgcgtcagtatcactggatcaccttgtggcacaaaagcgtggctctgccatcgataagccaaaacaagggactacaggaactgatatagatagtatccgcactgcaattttggaagaggctgcgattgtgttcgctacccttagcttcagtggctctgcacttcttgctaaatctaaccgtggtttcgatgtcgttataatagatgaagctgcgcaagctgttgagccagcaactcttatccctttggccactaggtgcaaacaagtatttctggtaggggatccaaagcaactcccagctactgtaatctcaactgttgctcaggattctgggtacggtacaagcatgttcgagagacttcaaaaggctggctatccagtaaaaatgttgaagacccaataccggatgcatccagagataagaagctttccgtcaaagcaattctatgaaggggcactagaagatggatctgacattgaagctcagactactcgtgactggcataaataccggtgctttggtccattttgcttttttgatatacatgaagggaaagagtctcaacatccaggagcaactggttctcgggtaaatctagacgaggtggaatttgttcttctcatctaccacagacttgtaaccatgtacccggagctgaagtctagttctcagctagctattatatcaccgtataactaccaagtaaaaactttcaaagatcggtttaaggagatgtttggtacagaggcagaaaaagtggttgatatcaacactgttgatgggttccagggaagggagaaggatgttgcaatattttcatgcgtcagagctaacgaaaatggacaaatcggttttctctctaattctcggcggatgaatgtggggattacacgagccaagtcttcagtattggtcgttggttcagctgcaacattgaagagcgatccactttggaaaaaccttatcgaaagtgctgagcaaagaaaccgattattcaaggtttcaaagccattgaacaatttcttcagcgaagagaatctggagacgatgaaactgacagaggacatggagattcctgatgcaccgttgtatgaagacgaatctcttccggtggcaccatatggtggagatgatgactttggagatggtgatgctgatcaagacgatgtagccatggccggagaagactaaactctaaaaaccttttcgttattagttagaactttgatattacaggaagtggttgaacatctaacaatatctacacttattatttgtatggttttattttggtttacatacagtaataagaatgtctttacttgtgctacg

SEQ ID NO: 86 - DNA, 1543 bp, Arabidopsis thaliana
  source 1..1543: mol_type = genomic DNA
ctctttctttgtgggttctagtttgtgtgtatatatactatatgcacatacacataggaagatatgatgggttacgagcagatgaatcagatgacaatgacgacaacagcgatgatgaagaattacaataagaagggactaatcaatactccacagaagaaaatgacgaggagaagtgtgtcggctattgatggtggtgcagctgcgacggctaaagaaggagatcgccgtcagaatatcaagactcttgatcttagcggcatgtccttggcttctctctctgcctcttctatcaacttagcttcaatctccaaactcgatctctccaacaacaatattcagaaaattccggaatctctagtagcgagaatgttaaatttgtgggcattggatttgcaatccaatcagctaaaaactcttccaaactccattggatgtctttccaaacttaagtttcttaatgtctccggaaattatctccaatctctccccaaaactatagaagattgcagatcgctggaagagctgaacgccaacttcaacgagcttacaaggctcccagacgcgatagggtttgagctaacgaatctgacgaagctctccgtcaactcaaacaagcttgttctcttgccaaactccgttagctacttgacgtcgctgcgtgtgctcgacgcgcggctaaaccgccttagttccctccctgaggatcttgagaacctcgtgaaccttcaggtcctcaacgttagccagaacttccagcacttgacgacgttaccttactccgttgggttgttgatatctctcgtggagcttgatgttagttataacggaattacggttttaccagactccctcggctgtcttcgccggattcagaagctatccgtggagggtaatcccctcatttccccaccatttgaagtggtggaacaggggttggaagcattgaagcagtatatgagcgagaagatgaccgagtcttataagaaaactccgaccaagaaaaagtcttggggcattggtaagctcgtaaagtacggcctgagctcttctccggggaggagtaccggccgtgaagacgggaaggaaggcttcatcaatgtatctgattaccgccaaatcgacggaatcgcctcaccgcgacatgtgtccctcttcaacccgcgacgcctcttgtctccactctccgcgtatttctctcctcctaggtattagcttatttaggtgtgttgtctgtctttttttttttcatcttctacatacgattccataccgttttcactgttacatccatgtagtgttaaattgttaatgttcttttacgttgttttctgcatgcttggtgtgaggataaaatttaattaaattgtgtatacgtttttttttccctgtctcatagaatttttctatggcttttctcatttcgttgtattgtagttcaattttgttgaacacatttgtaaactattacatagacacttaatattttactatgtatataatgtaaaatcgcatttttgaaagtactccaccatccttctca

SEQ ID NO: 87 - DNA, 1543 bp, Arabidopsis thaliana; identical to SEQ ID NO: 86
  source 1..1543: mol_type = genomic DNA

SEQ ID NO: 88 - DNA, 3675 bp, Arabidopsis thaliana
  source 1..3675: mol_type = genomic DNA
ctttcactcttcccttctctctccccaaaataaatcagaaacctatcaacattcttcaacagccacaagtaaaatttatagacatttctgtctgaagaagaaaaagattgaatttttttgcttgttgtgggttctttaatggatccaagaacaagacttgactatgctctgtttcagctcacaccaactagaacaagatgtgatcttgtgatattctctggtggtgagaatgagaaacttgcttctgggatttttcaacctttcgttacgcatctcaagagcgttagtgatcagatttctaaaggtggatactccgttactctccgtccttcctccgttggtgttccttggtttactaaagtgacccttcagagatttgtgcgatttgtgactactccggaggttcttgagaggtctgtaacattagagaaggagattgagcagatcgaggattcgattcaagctaatgcagccgccattgccggtgaagctgaaggaaacgagttgggtggtacatggacttctcaaaagtctacggctttatcaaagacgaaaggggaaactgatggagacactgtggaagaaaattcgaaggttggtcttcagcgtgttctggagaaccgtaaagcggctttgtgcaaagagcaagcgatggcttatgctcgagctttggttgttgggtttgaacttgactacatggatgacctcttttcgtttgctgatgctttcggagcttcgcggttaagggaagcgtgtgttaactttgtggacttgtgcaagagaaagaacgaggatagaatgtgggtggaccaaatcactgctatgcaagcatttcctaggcctgaattaacgttcatgggtgactctgggatcgtactcgctggtgaagagaatgatttgttgaatgctacaaacgtaaagcatggaaactctatggatgcctcgagccagggtagctttgagactggccaagaagggagagctcaaatggcaatgccgtggccaaaccagtttcctcagtacatgcagaactttcaaggacatgggtatccgcctccttatatgtttccggggatgcaaggtcaatcaccatatttccatgggaatatgcaatggcctgtaaacatgggagatgtggagtcaaatgagaagtcttccaagaagaaaaagaagaagaagaagaataagaagaagtcgaagcaagatgaatctgccgagccaagcgataattccagtactgagaccgaatcagaagacggaaatgaaggaaagaaacaatccaggaaagtggttatccgcaacataaattatataacttcaaagaggaatggagcgaaggagagtgattcagatgagtctggagaagaagaagggtttgtggatggagattctattaagcagcaagtagaagaagccattggctcagtggagagacgtcataaatcgacttcacaccgtcagaggaaacacaaaagtcacaacggtgatgatgattcaagtaacaaggaaactaaggggaatgataattgggatgccttccagaatcttcttttgaaagacaatgattcagagccagaagaattactacgtatatcatcaactgcgttaaatatggcgtctgaagttgtgagaaagagagaaccgccttctgatgattcattcttggttgcaattggaaatgaggattggggaagagaaaccagcattgagaaattcaatgcaggtgagaatgttcggataataaggaaagggaacaactatgacgaggagatgttgaatccgggtagaagcgatgaatcaagaagctattcgcaggcagagatgtcggttcatgatgggaagctcagaaccagaaatgaggcggaagaagactggttcatacgtaaccaagctggtccagaaacagatccaagtcttgtcaaaacatttgtaggagaccatttccacttaaataagagcagtgagagagatgtcctgaccgatgactctttcatgatccattctcgtgttgagaaccaagtagaagattctcggttaaggacagaaatcatggacttagacgtttacggaaccacccaacaagaaaacagtgccccggagaacactccgcatgaaccagatgacctatacatggttcttggacgggaacaagatgttaaacctacattgttaccatggacccctgaaattgactttgagactaacactttggctcaaagaacaagcagaatcgatttgataactgccacaaaggcctctgcaggtgaacaaaccttagatggtaaagaaaagaagagtcgtggtatctccaaggggaaggatgcaaagtcaagagcatcaagtagacctgacccggcgtcaaaagccaagagacctgcttggggaagtagagctgctgtctccaagtccaaatccgagatggaggaagagagaaagaagagaatggaggaacttttaattcagaggcaaaagagaattgcggagaagagttccggtggtagtgtatcaagttctttagcgtccaagaaaactcctactgtgaccaagtcagtgaagagctcgataaagaatgagaagactcctgaagccgcgcagtcaaaggctaagccagtactgagaagttccaccattgagcgccttgctgttgctcggaccgctccaaaggagccacagcaaaaaccagtaatcaaaagaacatcaaaaccttcaggatacaagacagagaaagctcaggaaaagaaatcgagtaaaataggtcaatcagatgcgaaaagtgtggaactttctcgtgacccgagtctcgaaatcaaggaaacggtggtggaagattcacattcttacttgtcagagaagcaagttgatgcacttcctgctgttgcttctgttgatgatttcaaagacattaaagaattgcatagcttgccatcagaagaaacggccagagtaaagaacagaccgaatgaaatcatagcagagaaagtacaagatcagacgaagatcgatgatcaggaaacagtgaagaatacatctgtttctgaagataagcaaatcaccacgaagcattactcagaggatgttggagaagtccaggcttcacaggaaaaaccggtgtctccaaagaagtcggtgactttttcagagacaaacatggaggagaagtattatttctcaccagcggtctcagagattgacatctcaacgccacctgctactgaagcagatcattcgaggaagaaatggaacagtgaagagacgtctcccaaggcaacggctaaagtcttcaggaagcttcttatgttcggaaggaaaaagtaaaaccgacgttggaattcttcttctccggcatcatcgaacctttgttttgagacgacgtcatgttgagttcagagaacaatatatggggatgtgttggaatcatgaatcgtaggttaaatcctacaagaggaaaagcttcaggagacagagaagatgaagagaagagaagaaaggaagaagaagaagaagtcgtgacaaagaaagtcagctaatagacatatctccgctatttaaagtcgagtctaagcctttatacacttaaaggttgagggttcgaacccttgttatgtctttttgccctaaaagaaaaaaactttctcatgaaattccgtgagatgattcttccattctaagcatttg

SEQ ID NO: 89 - DNA, 3675 bp, Arabidopsis thaliana; identical to SEQ ID NO: 88
  source 1..3675: mol_type = genomic DNA

SEQ ID NO: 90 - DNA, 3727 bp, Arabidopsis thaliana
  source 1..3727: mol_type = genomic DNA
atatccagataattaattctctcataatatcttctccacaatttcaactcttctaaagtctaaaccatgaagttactctcaaagacctttttgatattaactctcaccttcttcttctttggcattgcactagcgaaacagagctttgaaccagagatcgaagctttgaaatccttcaagaatggtatttccaacgaccctttaggagtattatcagattggaccatcatcggttcgttacgacactgtaattggaccggaatcacctgcgatagtaccggacatgtagtctcggtttccttgctggagaagcaacttgaaggtgttctgtctccagccatagcgaatctcacctatctccaggttcttgatctcacttcaaatagttttaccggcaaaataccggctgaaataggaaagttaaccgagcttaaccagcttattctgtacctaaactatttctctggttcgattccttctggaatctgggagcttaagaatattttctatcttgatcttagaaataatttgttgtccggtgatgttcctgaggaaatctgcaaaaccagttctttggtattgattgggtttgattacaacaacttaaccgggaaaataccagaatgcttaggagatttggttcatctccaaatgtttgtagcagctggtaaccatttaactggttcgattccggtatcaattggtactctggctaatttaacggatttagacctgagtggtaaccagttaaccggaaaaataccgagagattttggaaatctcttgaacttacagtctctcgttttaactgaaaacttgttggaaggagatataccagctgagatcggaaactgctcgagcttggtccaacttgagctttacgataaccagttaaccgggaaaataccagctgaattagggaatttggttcagctgcaagcactccggatatacaagaacaaacttacttcttcaattccatcttcattgttccggttaactcagttaacccatttggggttatcagaaaaccatttggttggaccgatatcagaagaaatcggttttcttgagtcacttgaagtcctcacacttcattccaacaacttcacaggagagtttccacagtccatcacaaacttgaggaacttgacagtcctaacggtggggttcaataatatttccggtgagctcccggcggatctagggcttcttacaaaccttcggaacctttcagcgcacgacaatcttcttaccggaccaataccttccagcataagtaactgcaccggtcttaaactcctggacctgtctcacaaccaaatgactggcgagatcccgcggggtttcggaaggatgaatcttacgttcatttctattgggaggaatcatttcaccggtgaaattccagatgatatcttcaactgttcaaacttggaaactcttagtgtggcagataacaacttaacaggaactctcaagccattaattgggaagcttcaaaaactcaggattttgcaagtttcatataactctctcactggaccgattcctcgagaaatcgggaatctgaaagatttgaatatcttgtaccttcactctaatggtttcacagggagaatcccgagagagatgtcgaatctcactctcctccaggggctaaggatgtattcaaatgatcttgaaggtccaattcctgaagaaatgtttgatatgaagctactctcagttcttgatctttccaacaacaaattctcaggtcaaattcctgccttgttctccaagcttgaatcgcttacctacttgagtcttcaaggaaacaaattcaacgggtctatccctgcaagccttaagtcgctttcgcttctcaacacattcgatatctccgacaatcttctcactggaaccatccctggagagctgttagcttctttgaaaaacatgcagctttacctcaacttctcaaacaacttgttgactggaaccatcccaaaggagcttggaaagcttgaaatggttcaagaaatcgacctttcaaacaatctcttttctgggtctattccaagatctttacaggcctgcaaaaatgtgttcacactggatttttcgcagaacaatctctcgggtcatataccagatgaagtcttccaaggcatggatatgatcataagcttgaacctttcaaggaacagtttctctggagaaatccctcagagcttcgggaacatgacgcatttggtctccttggatctctctagtaacaatctcactggtgaaattccagagagtctcgccaatctttcgactctgaaacatctcaaactagcttcaaacaacctcaaaggccatgttcctgaatccggggtgttcaaaaacatcaacgcctctgatctaatgggaaacacagatctctgtggtagcaagaagcctctcaagccatgtacgatcaagcagaagtcgagccacttctcgaagagaaccagagtcatcctgattattcttggatcagccgcggctcttcttcttgtcctgcttcttgttctgattctaacctgttgcaagaaaaaagaaaaaaagattgaaaattcatcagagtcctcattaccggatttggattcagctctgaaactgaagagatttgaaccaaaagagttggagcaagcaacagattcattcaacagtgccaacatcattggctcaagcagcttaagcacagtgtacaaaggtcagctagaagatgggacagtgattgcagtaaaagtattgaatctaaaggaattctctgcagaatcagacaagtggttctacacagaagctaaaacattgagccaactaaaacatcgaaacctggtgaagatcttagggtttgcgtgggaaagcggcaaaacgaaagctttagtgcttccatttatggagaatggaaacttggaggacaccattcacggctctgcagcaccgattgggtcgcttttagaaaaaatcgatctttgtgttcatatcgcaagcggaatcgattatcttcattctggatatggttttcccatcgttcattgtgatctgaagccagctaatatactccttgacagtgaccgcgttgctcacgtaagcgattttggaactgctcggattctaggtttccgcgaagatggaagcaccacagcttcaacatcagccttcgagggtacaattggatacttagctccagagtttgcttatatgaggaaagtgacaacaaaagccgatgtattcagcttcgggatcataatgatggagctgatgacgaaacagagaccaacttcgttgaatgatgaagattcacaagacatgactttgcgccaattggtggagaaatcgattggaaatggaagaaaagggatggttagggttcttgatatggaactcggggactctattgtttctctgaaacaggaagaggctattgaagactttctgaagctttgtttgttctgtacaagctctagacctgaagatcgacctgatatgaacgagattcttacacatctgatgaaacttagaggcaaagcgaattcatttcgagaagatcgtaacgaggatcgagaagtttagcagcaaagcttttttgatgacattttttcgactttgccaaactctgttacgaaggttgaatactttggacgtaaaacgttctgattttgcttttcgttatgtatttctgttttatataaggttgaaatttggttttgat

SEQ ID NO: 91 - DNA, 1177 bp, Arabidopsis thaliana
  source 1..1177: mol_type = genomic DNA
caaaacaaaacgccattttttgtcgattcttcgtcgtcctcctttgaaattcacaccaatttgtctctcttcctagagaaacaaaagattattcgaaactcgggaaagtatcatccggtcaccggaaaattgattatttccgatgccaataggtgaccgtcagaatccgagtgtggagaagaagaagaacctcttcaggctatgtccgttttggcagaggagaagcaccacttcttcatcttcaacacagaatccaaaccaaaactaccgtagccgccatggaaatcggaatacagatatttccgccgtctctaagcctccgttgactatgtcttccgtcgccagatcacttcttccagctcgccgtcgtctccgactagatccttctagttatctgtatttcccttatgaacctggaaaacaagttcgcagcgcaataaagcttaagaacactagcaaatctcatactgcatttaagttccaaacaacggcacctaagagttgttatatgcgtcctcccggaggtgttttggctccaggagagagtgtttttgctactgtgttcaagtttgtggaacatccagagaacaatgaaaagcagccgttgaatcagaagagcaaggttaagtttaagattatgagcctgaaagttaaaccaggagtagagtatgtgcctgagttgtttgatgagcaaaaggatcaagtagcagtggagcaggttcttcgggtcatttttattgatgcggaccgcccaagtgctgcattggagaaactgaaacgtcaattggatgaagctgaagctgcagttgaagcaagaaagaagcctcccccagagacagggcctcgagttgtcggggagggtcttgtcatagacgaatggaaggagagaagagagaagtaccttgctcggcaacaagtcgaatccgtagattctttgtcctaaacgcagagagcaatgtggacttgttctgcagatcatgtacataatttattatccctcgattatgtatttatctctagacgattactttgtggttcttgtatgtctctgtttgttgtgtgattcatgccggttttttctccttcatcaaattttgtttcggtcgtttttagttgatctagaatcgaaccagagtttgttcagtatttagttacaaatgaaaaatcctgttatacc

SEQ ID NO: 92 - DNA, 1115 bp, Arabidopsis thaliana
  source 1..1115: mol_type = genomic DNA
tactcacttttacaactaactcataagtaaaacacagacagtttttagatggctaagatatattccccttcttttcccggtactctctgtctttgcatttttactctcttgacgctaatgttcattcgggtttccgctcgacccgcgacattcgtcgaggatttcaaagccgcctggtcggaatctcacatccgtcaaatggaagacggaaaagctatccagctcgtccttgatcagagcactggatgtggatttgcttccaaaagaaaatatctattcggacgagtgagcatgaagatcaaactcattcccggagactctgccggtacggtcaccgctttctacatgaactccgatacggccacggtgagagacgagctagattttgagttcttgggaaacagaagtggtcaaccttactcagtgcaaacaaacatatttgctcatggcaaaggagatagagaacaaagagttaatctttggttcgacccatctatggattaccacacttacactatcttatggtcacacaaacacattgttttttacgtagacgatgtgccaataagagaatacaaaaacaacgaagccaagaacatagcttacccaacatcacaacctatgggagtatactcaacattatgggaagcagatgactgggcaacacgtggtggattagagaaaattgattggagcaaagctccattttatgcttattacaaagatttcgacatcgaaggttgtcctgttcctggaccaaccttttgtccatcgaaccctcataattggtgggaaggttatgcctatcagtctcttaacgccgttgaagctcgacgttaccggtgggttagagtaaaccatatggtttatgattattgtactgaccggtctaggtttcctgtcccaccacccgagtgtcgtgcttgaaaataattgcatacgtacgttgcaatgatcatgtttcgtcttgtacgagattttatatataaattgtgggaaaatgtggattgtattgtcctcttacgcaattgtgcagacgtacgtgagtgtgtatagatataattgtgatttgtggttatttgaaatttttataaacatagatgaattctgtgaag

SEQ ID NO: 93 - DNA, 1981 bp, Arabidopsis thaliana
  source 1..1981: mol_type = genomic DNA
actggtgtgcgcactaagcaagcatactctattatttgtcgaaatcacaagagccagccagtctctctgagttctatcacaatcttcttcttcagagcttattgagtaatggcggcttcaatgcagttctacggagttaaaacaccagaacttgccttaaactcaaaaaggattgagtttagctcaaaggggctcaacttctcagcactcgtgtcctctgctcgtgtattctctagaaacgtagatcgttcttgtaagaacatcgctctgagagttacttgtgaagcgggaagagtggagctgctagagagaaaagcctcagagactttcaagttaaacaaaactgagaaaaaattgacctgtgtaatgaaattcggtggctcatcagtggcatcagcagaaaggatgatacaagttgccaaactcatactcagcttcccagatgagaagcctgttgttgtgctatcagcaatggcaaagaccaccaataagcttttgatggctggggagaaggctgtttgctgcggtgtcaccaacgtcgacactatcgaagagttgagctatataaaggaactccatataaggactgctcatgagcttggagtggaaacagcagttattgcagaacatctagaaggactggaacagcttcttaaaggcgtcgcaatgatgaaggaattaactttacgctcaagagactacttggtttcatttggagaatgcatgtccactaggctatttgctgcgtacctgaacaaaattgggcacaaagcacgacagtatgatgcatttgagatcgggattatcaccacagatgacttcactaatgctgatattcttgaggcaacatacccggcggtttcgaaaaagttacttggtgactggagcaaggaaaatgcactccccgttgtcacaggcttccttggaaagggatggagatcttgtgctgtaactacgcttggtagaggaggtagcgatttgactgcaacaacgatcgggaaggctttaggtttgcgggagatccaggtttggaaagatgtggatggagttttgacttgtgatcctaacatttactgcggagctcaacctgttccacacttgacatttgatgaggctgctgaacttgcttactttggtgcccaggtgttgcatccactttccatgcgcccagcgcgagaaggtaacattcctgtaagggttaagaactcttacaatcccactgctccaggaactgtcatcaccagatcaagagacatgagcaaggctgtattgaccagcatcgttctgaaacgtaatgtcaccatgttggacatcactagcacccgtatgctcggccaatatggtttccttgccaaggtgttttccacatttgaaaagttgggcatatctgtggatgttgttgcaaccagcgaagttagcatttctttgacattggatccttcaaagttctgtagcagagagttaattcaacacgagcttgatcaggtggtggaggaacttgagaagattgctgttgtaaatctgcttcgacacagatcaattatctctctcatcggaaatgttcagagatcatcattcatattagagaagggcttccgagtacttcgaaccaatgggattaatgtccagatgatctcccaaggtgcatctaaggtaaacatctcactgatagtgaatgatgatgaggcggagcattgtgtgaaggctctccactcggccttctttgagacagacacttgtgaagcagtctcagaatgcccgaccggctacatcgctgcctcttcgtgaaacctctaggtgcaacctgcaaggtctgaaagtactagctagtttgatgttatgattcttgtcagactggtattaggaaacaaagctcccattctccttgtgtaatataatgtaatttgattgggagatgtactggaaaatcaataagttttcctatttgaatatatgattaggactgcctacaacatcagtt

SEQ ID NO: 94 - DNA, 3043 bp, Arabidopsis thaliana
  source 1..3043: mol_type = genomic DNA
atgagatctcttctctttgtactatcactcatttgcttttgctctcaaacagcactttcatggaagaaggaagagtttcgcagctgtgaccaaactccattttgtaaacgcgctcgatctcgtactcccggcgcgtgttctctaattgtcggcgatgtttccatcactgatggagatctcgtagcgaagcttctaccgaaagcgcctaatcaaggcgatggggatcagatcaagccgttgattctttctctctcagtttacaaggatgggatcgtgcggcttaaaatcgatgaggaccattcgttgaacccgccgaagaagaggttccaagttcctgatgtggtagtgtctgagtttgaggagaagaagatctggctgcagaaagtagcgacggagacgatctctggagacactagtccgtcttcagtagtttatgtatccgatggttacgaggcggtggtgcgacacgatccgtttgaggtgtatgtgcgtgagaaatcaggtgatcgccgtcgcgttgtgtcattgaattctcatggattatttgattttgagcagttggggaggaaaactgaaggagataactgggaagagaaatttaggactcatacagattctagaccatctggtcctcaatctattagtttcgatgtttcgttttatgattccagtttcgtttatggaattcctgaacacgccactagcttcgcgttgaagcctaccaagggtcctggagttgaggaatctgaaccctacaggctttttaatctagatgtgtttgaatacgatcatgaatcaccgtttgggctttacgggtcgattccgttcatggtttcgcatgggaagtctggtaaaacttcaggatttttctggttgaatgctgcggaaatgcagattgatgtgttggctaatggttgggatgcagagagtggtatttctttgccttctagtcacagtaggatcgacacattctggatgagcgaggcagggattgtggatacattctttttcgttgggcctgagccaaaggatgttgtaaagcagtatgcaagtgtgacaggtacttcagccatgcctcagttgtttgccactggttatcatcaatgtaggtggaactacaaagatgaggaggatgtggcacaggtggactcgaaattcgatgaacacgatattccttatgatgttctctggcttgacattgagcatacagatgggaagagatactttacatgggatagtgtgttgtttcctcatccagaggagatgcaaaagaaattggctgcaaagggtaggaagatggtgaccattgtggatcctcatatcaagagggatgactcatacttcttacacaaagaggctactcagatgggatactatgttaaggattcatctggaaaagactttgatggttggtgctggcctggttcatcatcttacattgatatgttgagcccagagattagaaaatggtggggtgggaggttctcgtataagaactatgttggttcaactccatcattgtacacctggaatgacatgaatgagccttctgtattcaatggtcccgaggttactatgccaagagatgcattacatgttgggggtgttgaacacagagaagttcataacgcatatggatattacttccacatggcgacttccgatggacttgttatgcgtgaagaaggaaaggataggccttttgtattgtcaagagcaatctttcccggcactcaaagatacggagcaatttggactggagataacacagccgaatgggaacaccttagagtctccattccaatgatattgacacttggtcttactggaattacattctctggagctgatattggtgggttttttggaaatcctgaaccagaacttctagttaggtggtaccaagtgggtgcttactatccatttttcaggggtcatgctcatcacgataccaaaagacgagagccttggttgtttggtgaacggaacacagaactcatgagagatgccatacacactcgttacacactgctcccatacttctacacgttgttcagagaagcaaacgttacgggtgttcctgttgtacgcccattatggatggaattcccgcaagatgaagctacttttagcaacgatgaagccttcatggtcggtagtggtctactggttcaaggagtttacaccaagggaacaacgcaagcttccgtgtatttgcctggcaaagaatcatggtatgacttgagaaacggtaagacttacgttggaggcaagactcacaagatggatgctccagaggagagtattcctgcgtttcaaaaggcaggaaccatcatcccaaggaaggaccggtttaggcgaagttcctctcaaatggacaatgatccttatactttggtggtagctttgaacagttctcaagaagcagaaggtgaactctacatcgatgacggcaaaagctttgaattcagacgaggctcttacatccatcgtcgcttcgtcttctcaaagggtgttcttacatcaacgaacttagctcctccagaagctcgtctctcttcccaatgcttgatcgacagaattatcctcttgggacacagctcaggtccaaaatctgcgttggtggaaccgttgaatcaaaaggcagagattgagatgggacctctgcgaatgggtgggcttgtagcttcctcgggtacaaaggtgttgactatccgcaaaccgggtgttcgagtggaccaagactggaccgtaaagattctgtgattgaacggtttgaaccagtttcactcatggccgttagagtggccgaaatctgcttttccggcgacggaatatcacactttttaatatatgtttggagatttagacttaaatagttgtaagagctaacagtttgaaagtcactttgcattgttgtttatcttcatataaatgagtttagattttgataatttcagaattcgtggaatcataattaacaattttgatagggaaaaataatttgttttttttagtcagagggtcaaataatcttaccttc

SEQ ID NO: 95 - DNA, 787 bp, Arabidopsis thaliana
  source 1..787: mol_type = genomic DNA
attttttctagggtttcctcttccgcattcgtcgtcttcagctcctcctacacagtttcttctctgaatctacttaggaagctaaaatgggtagatgtccgactagaaaagtgaagaagaggagattatctcacaaaacagctcgccgtgacaaattcgaagtcaaaggcgatgacttggtttacacagagttgcgtaaaccggagacggagattaagccgttacagcttgacgaggatttgcctggaatgggtcaattctactgcttacactgcgatcgatacttctccaacgtatcagtgagggatgatcatttcaagactaagaaacacaagaagcgtgtgaatatgatgatgggacaagcgccacactcgcaactcgatgcagatttagccgggggaatggggatgccggacaatggcccaaagctgatgtctaatttggtattcacagagttgcgtaaaccagagacggaggatttacctggaatgggtcaattcaactgcttactctgccatcggaacttctccaatgcatcagtgatggattatcatttcaagactaagaaacacaaaaagcgtgtgaagaagatagagcgaccagcgccacactcgcaactcgatgcagatttagctggtggaatgggaatgccagacaatggtccaaagctgatgtctgcctgagtttttacagttattttccttatttagttaatggaacccgaaattttgttgtaaaactataatctcctaaattaatgatacaggttttttgtctgttgccaagt

SEQ ID NO: 96 - DNA, 1397 bp, Arabidopsis thaliana
  source 1..1397: mol_type = genomic DNA
aaaataatggcttcgcccgggttcgaaccggagaccttcagtgtgttagactgacgtgataaccaactacaccacgaaacctacatgcttctttctaacctcaacaatatatatatacatatagataactgtttaatattgtaacttgtaaccagtgtcggctaatttcgacttttgtagatctttttctgctctttctctctctctctctctctctctctctctctctctctctcttgtattatttctatctcccccgccgtcgaaagagaaacgtcgatcggagaacctttgaaatgtcgactggattagatatgtctctcgacgacatgatcgccaagaaccgtaagtctcgtggtggagccggccccgctcgtggaaccggatccggatccggaccgggtccgactcgccgcaacaaccctaatcggaaatcaacccgatctgctccataccaatcagccaaggcgccggagtccacctggggtcacgacatgttctccgatagatctgaagatcaccgatcgggacgttcctccgccggaatcgaaactggaaccaagctctacatttccaatttggattacggtgtcatgaacgaagacatcaaggaactgtttgctgaagttggagaacttaaacgctacacagttcattttgatagaagtggaagatcaaagggaactgctgaagtagtgtattctcggcgtggcgatgcactcgcagctgtgaagaagtataatgatgttcagctggatggaaaacccatgaagatagagattgtgggcactaatcttcaaactgctgcagccccgtctggtagacctgcgaatggaaactccaatggtgctccatggagcagaggaggacaagggagaggaggtcaacaacgaggtggtggacgaggaggcggtggccgaggtggtggtggtcgtggtaggcgtcctggtaagggccctgcagagaagatttctgcggaagatcttgatgcggatcttgataagtaccattctggagatatggagacaaactaaggaacgtgactgatcttctcaaaccggtaggggttttaggaggaagagaatcgagaaaatgtttgccagaggctttaccacttagcgcctttttggctgtgttgttcatttgtttcattagaatgactttacagaattgagaatatgtgttatttaaagttgttgtctatcttaataccctcaagtgaaaggcagaggaaggaataccaatttcgtttacagatcatatgcaggcaaaagagttttcagaaatcaggtttagttacttgtattgtgtctcttatccaagccatgccttgtggtattatgagcgcagaattttgattgaatattgttcatttgcattaaagtatcaaaccattt

SEQ ID NO: 97 - DNA, 636 bp, Arabidopsis thaliana
  source 1..636: mol_type = genomic DNA
aaaactcctccgtaaaaccctttcatttgcatttgggaatcgattgctcttcttcgtagtcgcctttgaattcgcagagtgagaagcaatgaaggtgagatcatctgtgaagaagatgtgtgagttttgtaaaacagtgaaacgtcgtggacgtgtgtatgttatatgctcttccaatcctaagcacaagcaaagacaagggttcagttcctttgcttatgaaggaattacaccttcccctttgtttgctgagccgattgctagtcaggagttggtgaggctgcctggtcagggggtatcagccggactggcatcacttttacacaaaaggcctatgccaacagcgtatttcggatggaggtctggtcttgcatccattctcttcaaacaaggaaattaggatgtcagcatttccctttttattcttcagatttgtaatcgcagttttcttccaattcctatgaaacattattgtatatctctccacttttactttggtcagtcgtatgctccttcgagacctgtttgattgtgcctcgcatgacctgaacaaagagatatattatgacactcgagtatttgtttttacattttccactggagcatatgttagggatcaatatgtttttcttttag

SEQ ID NO: 98 - DNA, 666 bp, Arabidopsis thaliana
  source 1..666: mol_type = genomic DNA
tgctcttcttcgtagtcgcctttgaattcgcagttagagatggatgcttcagattcgttttacttttgcttccatcatcggatcaactaaggattgcagtttttctgagtgagaagcaatgaaggtgagatcatctgtgaagaagatgtgtgagttttgtaaaacagtgaaacgtcgtggacgtgtgtatgttatatgctcttccaatcctaagcacaagcaaagacaagggttcagttcctttgcttatgaaggaattacaccttcccctttgtttgctgagccgattgctagtcaggagttggtgaggctgcctggtcagggggtatcagccggactggcatcacttttacacaaaaggcctatgccaacagcgtatttcggatggaggtctggtcttgcatccattctcttcaaacaaggaaattaggatgtcagcatttccctttttattcttcagatttgtaatcgcagttttcttccaattcctatgaaacattattgtatatctctccacttttactttggtcagtcgtatgctccttcgagacctgtttgattgtgcctcgcatgacctgaacaaagagatatattatgacactcgagtatttgtttttacattttccactggagcatatgttagggatcaatatgtttttcttttag

SEQ ID NO: 99 - DNA, 1991 bp, Arabidopsis thaliana
  source 1..1991: mol_type = genomic DNA
attccttgcttcatttttcgtcaccctagccgctttactctcttgcgatatctctgaggtaattctggagcagcataaacaatcaattgattcattcttcttgataccaagttgtggaaactctaggattgtttgctgtatatctccagaattgctgttttgattgaatttaggtcgcttagctcagttgatagagcaccacattttttgtggtagaaatcgatttgtttgacagtctctaaccatgggtaaagagaagtttcacatcaacattgtggtcattggccacgtcgattctggaaagtcgaccaccactggacacttgatctacaagttgggtggtattgacaagcgtgtcattgagaggttcgagaaggaggctgctgagatgaacaagaggtccttcaagtacgcatgggttttggacaaacttaaggctgagcgtgagcgtggtatcaccattgacattgctctctggaagttcgagaccaccaagtactactgcactgtcattgatgctcctggccatcgtgatttcatcaagaacatgatcactggtacctcccaggctgattgtgctgtccttatcattgactccaccactggtggttttgaggctggtatctccaaggatggtcagacccgtgagcacgctctacttgctttcacccttggtgtcaagcagatgatctgctgttgtaacaagatggatgccactacccccaagtactccaaggccaggtacgatgaaatcatcaaggaggtgtcttcctacttgaagaaggttggttacaaccccgacaaaatcccatttgtgcccatctctggatttgagggtgacaacatgattgagaggtccaccaaccttgactggtacaagggaccaactctccttgaggctcttgaccagatcaacgagcccaagaggccgtcagacaagccccttcgtctcccacttcaggatgtctacaagattggtggtattggaacggtgccagtgggacgtgttgagactggtatgatcaagcctggtatggttgtgacctttgctcccacaggattgaccactgaggtcaagtctgttgagatgcaccacgagtctcttcttgaggcacttccaggtgacaacgttgggttcaatgttaagaatgttgctgtcaaggatcttaagagagggtacgtcgcatccaactccaaggatgaccctgccaagggtgctgctaacttcacctcccaggtcatcatcatgaaccaccctggtcagattggtaacggttacgccccagtcctggattgccacacctctcacattgcagtcaagttctctgagatcttgaccaagattgacaggcgttctggtaaggagattgagaaggagcctaaattcttgaagaatggtgatgctggtatggtgaagatgactccaaccaagcccatggttgtggagaccttctctgagtacccaccacttggacgtttcgctgtgagggacatgaggcagactgttgcagtcggtgttatcaagagtgttgacaagaaggacccaactggagccaaggttaccaaggctgcagtcaagaagggtgccaagtgaactctgaacatcaaaactctttccgctgatgaaatgaaggactattttagtttctttactttagtagtttggtatttggttggttgtttgtgttaccgcttcgtttattctccgtcggagctcaattctcggaattgggttcttgatcggaggtggcggaggtacttggcactcgagcttcctgtttatttcttttgttttgtgttatgattttgaacctttttggatattcggttatatgatatttgtgtcattcctgcggatattatcttatcttatcaacttaagtctgtttttcttctctaaaattcaacgatcagcctctgaagtttcttacatggtaaaattgtaatctagaactttaaacaacattggagaaacaagtctatatcagttt

SEQ ID NO: 100 - DNA, 1408 bp, Arabidopsis thaliana
  source 1..1408: mol_type = genomic DNA
tcatgatccttaatcttagctcctagggtttctgtgaattagtctaattttacaattttatgcctttgaggatatatcttaatgtgaaagttttaaacttgtaactcaaaaaccatttgttagttagtaatcatcatcattctgaattgagctttgtttgaatttgagtagggcaacgaaagattcaagttagttgcggtggtaagagtgaggtgttgaagagtgatacaatggaacctcatgaagcagaaacgtttgtgaacaagagaaccctttatgctcccattgagccatatagcagtggaaatttaaaggtttcagatgttcacactctctactgggagcaatcaggcaaacccgatggacacccggttgtttttcttcacggcgggccgggaggagggacggctcctagtaataggagattcttcgatccggagttttatcggattgttctgtttgatcagagaggtgcggggaagagtacaccgcatgcttgtttggaggaaaacaccacatgggaccttgtgaatgatattgaaaaactaagagaacatttgaaaatacctgaatggctggtttttggaggatcatggggaagcactctagctcttgcatacagtcagtctcaccctgacaaggttactggtttggtccttagagggatctttttgttgcgtaaaaaggagattgactggttttacgagggcggtgctgctgctatttaccctgatgcttgggaggagttcagagatcttattccagaaaacgagagaggtagtagccttgtggacgcgtatcacaaaagattgaattctgatgatctggaaattcaatacgcagctgcaagagcttggactaaatgggaaatgatgactgcttatcttcgtccaaatcttgaaaacgttcaaaaggcagaggatgataaattttcattggcgtttgcaaggattgaaaatcactactttgttaacaaaggtttcttcccgtcggactcacacttgctagacaatgttgataaaatacgacatatcaagaccaccattgttcagggaaggtatgacgtatgctgtcctatgatgtctgcttgggatctgcacaaagcatggccagaggcagaactcaagattgtttatgatgctgggcactcggcaaatgagccaggaatatcagcggaactcgtggttgccaatgaaaagatgaaagcacttatgggatgaagtatttgatggaatgaaagctgctcattttgttcatttctttgggacctttgttcatattttcaagtttgttgctgcaaagtaaatatcacattcagagttagttgttaacgcgaaaccgaatgttatttccatggacgtttatacccaaatgaaaaagacaatgacataggtgcagtgttttgaaa

SEQ ID NO: 101 - DNA, 1213 bp, Arabidopsis thaliana
  source 1..1213: mol_type = genomic DNA
acagagttcagaatatcgacggcgacaatttctctctccggctaacttttttctagagaaagctatggcggacgaagaagatgagttactggagacagaactaagttacgaccagaaaaaggaaatcgccaagtggtttttcctcaacgctcccgctggagaaatcaattacgtcgctaaagatttaaaggcggttttgagcgatgaggaagtgtacaatgaagcagccatggaagcatttccagtgtacaacaaaactcacatgatttgccttgaaatgcccagtggagctggtgatgtgattgtctcatcttacagtgaaattaatgaaaatgagtaccttgatccaagaactgcccaggttgccatagttgatcatgttaaacagatttgtacaaaggtacggcctgcaaatgatgaagaacttccttctttgtatattgaggagtacagatatgctcttgatgctgaaatccagagatatgttagtgaatcttatccgaaaggtatgtctgcagttaattgtgtgaaagggaaagataatgagggtccagggtccgactttgagcttgttgttataattactgctatgagacttagtccccagaacttctgtaatggaagttggagatctgtatggaacatagatttccaggatgaatcccaggtgcttgacataaaagggaaattgcaggtaggagctcattattttgaagagggaaatgtggaattagatgcaaaaaaagatttccaagattcaacaatatttcagtctgcagatgactgcgcgattgccatagccaatattatcaggcaccatgaaacagagtaccttgcatctctagaggtagcttattcaaaattaccggataacactttcaaggatttgaggaggaaacttccggtgacacgaactctgttcccatggcagaacactttacagttcagcctaacaagagaggtcgagaaagaacttggacttggcaagataagtattatttctgttgtgtcttgtctttcctttggagtaatgtatacaaatcgcattagtaagtatgatagatattgttccgcaagccgcatgaaagaattgaagtttggtcccaaaaagagctccgttgccgggaatcgaacccgggtctcctgggtgaaagccagatatcctaaccgctggacgacaacggatatgttattggaactgttaaagaactaa

SEQ ID NO: 102 - DNA, 2160 bp, Arabidopsis thaliana
  source 1..2160: mol_type = genomic DNA
ctcgtctccttctccacttggatctcaaaagtccgatccaaaaccaaatccgccataactctctctctctctcccacttcccacagagagacacattcatgccagcaatgccaggtctcgtctcagtcaaaactccttccgatacaccgccgctacgtgtagccgtaccagacacgcaacctctctcaaacccgccgcgaactccgatgaagaaaaccccttcctctacaccatctcgatccaaaccatcaccaaatagatccaccggcaaaaaagattccccaaccgtatcctcctccaccgcagccgtaatcgacgtcgacgatccatctctagataatccagatctcggtcctttccttctaaaattagctcgtgacgctattgcttctggtgaaggtcctaacaaagcattagattacgcgatccgagcaactaagtcctttgagagatgttgcgccgccgttgctccgcctattcccggtggtagcgatggtggacctgttcttgatctcgctatgagccttcatgttctcgctgctatttactgtagtctcggccgatttgatgaagctgtaccacctcttgaacgagctattcaagtccctgatccgactcgtggccctgaccactctctcgctgcgttttctggtcatatgcaacttggtgatacgttgtctatgcttggtcagattgatagatctattgcttgttatgaagaaggtcttaagatccagatccagactttgggtgatactgatccacgagttggtgaaacttgcaggtacttagcagaagcatatgttcaagcaatgcagttcaataaagcggaagagttatgcaagaagactctagagattcaccgagcgcatagtgaacctgcttcactggaggaagcagctgataggagattgatggcaattatctgcgaggctaaaggagattatgaaaacgctcttgagcatcttgttcttgctagtatggctatgattgcgagtggacaagaatctgaggttgcatcgattgatgttagtattgggaatatttacatgtcgctgtgccggtttgatgaagctgtgttttcatatcagaaggctcttactgtgtttaaggcttctaaaggagagactcatccgacggttgcgtcagtgtttgttagattggctgagctttaccatagaacagggaaacttcgtgagtctaagtcttactgtgagaatgcgttgaggatatacaataagccggtgcctgggacaactgtggaggagattgctggtggattaactgagatttctgctatttatgagtctgtagatgaacctgaggaagcattgaagctacttcagaagtctatgaaattgcttgaggataagccaggacagcagagcgccattgcagggttagaggcacggatgggagttatgtattacacagtggggaggtacgaggacgcaagaaacgcgtttgagagcgctgtgacaaagctacgggcagcaggtgagaaatctgccttcttcggtgttgtattaaaccagatgggactagcctgcgttcagcttttcaagattgatgaagcgggtgagctgtttgaagaagcaagaggtattcttgaacaagaacgtggaccgtgcgatcaggacactctcggtgtttatagcaatctagctgctacctatgacgctatgggaaggatagaggatgcgattgagatattagagcaggttctgaagctgagagaggaaaagctcgggactgcgaatccggattttgaagacgagaagaaacgtttggccgagcttttgaaggaagctgggcggtcgcggaactacaaagccaagtcgctccagaatctgattgatccaaatgcaagacctccgaagaaagagtcttctgctaagaaatggcccagcctcggtttcaagttctgaggaaaaaattatcatataaaataaatcatccacatatatattcaatattttattttattgttattgttatattttttatctgatctattttctgtatcataatctgaggttgatgaattaatttcatgtatagtgtttttatttgagtttggtgaaatactgccaagatggtgagctgtttgtttgagtttgaaatttctttaattcaatcacttttttcttcttctgataa

SEQ ID NO: 103 - DNA, 2248 bp, Arabidopsis thaliana
  source 1..2248: mol_type = genomic DNA
ctcgtctccttctccacttggatctcaaaagtccgatccaaaaccaaatccgccataactctctctctctctcccacttcccacagagagacacattcatgccagcaatgccaggtctcgtctcagtcaaaactccttccgatacaccgccgctacgtgtagccgtaccagacacgcaacctctctcaaacccgccgcgaactccgatgaagaaaaccccttcctctacaccatctcgatccaaaccatcaccaaatagatccaccggcaaaaaagattccccaaccgtatcctcctccaccgcagccgtaatcgacgtcgacgatccatctctagataatccagatctcggtcctttccttctaaaattagctcgtgacgctattgcttctggtgaaggtcctaacaaagcattagattacgcgatccgagcaactaagtcctttgagagatgttgcgccgccgttgctccgcctattcccggtggtagcgatggtggacctgttcttgatctcgctatgagccttcatgttctcgctgctatttactgtagtctcggccgatttgatgaagctgtaccacctcttgaacgagctattcaagtccctgatccgactcgtggccctgaccactctctcgctgcgttttctggtcatatgcaacttggtgatacgttgtctatgcttggtcagattgatagatctattgcttgttatgaagaaggtcttaagatccagatccagactttgggtgatactgatccacgagttggtgaaacttgcaggtacttagcagaagcatatgttcaagcaatgcagttcaataaagcggaagagttatgcaagaagactctagagattcaccgagcgcatagtgaacctgcttcactggaggaagcagctgataggagattgatggcaattatctgcgaggctaaaggagattatgaaaacgctcttgagcatcttgttcttgctagtatggctatgattgcgagtggacaagaatctgaggttgcatcgattgatgttagtattgggaatatttacatgtcgctgtgccggtttgatgaagctgtgttttcatatcagaaggctcttactgtgtttaaggcttctaaaggagagactcatccgacggttgcgtcagtgtttgttagattggctgagctttaccatagaacagggaaacttcgtgagtctaagtcttactgtgagaatgcgttgaggatatacaataagccggtgcctgggacaactgtggaggagattgctggtggattaactgagatttctgctatttatgagtctgtagatgaacctgaggaagcattgaagctacttcagaagtctatgaaattgcttgaggataagccaggacagcagagcgccattgcagggttagaggcacggatgggagttatgtattacacagtggggaggtacgaggacgcaagaaacgcgtttgagagcgctgtgacaaagctacgggcagcaggtgagaaatctgccttcttcggtgttgtattaaaccagatgggactagcctgcgttcagcttttcaagattgatgaagcgggtgagctgtttgaagaagcaagaggtattcttgaacaagaacgtggaccgtgcgatcaggacactctcggtgtttatagcaatctagctgctacctatgacgctatgggaaggtaaagtcctaaagaaaactatctgactatgtaattagatcagacatccttaatgaaacattaaagtctttcttcgtgatggctatgtaatttgcaggatagaggatgcgattgagatattagagcaggttctgaagctgagagaggaaaagctcgggactgcgaatccggattttgaagacgagaagaaacgtttggccgagcttttgaaggaagctgggcggtcgcggaactacaaagccaagtcgctccagaatctgattgatccaaatgcaagacctccgaagaaagagtcttctgctaagaaatggcccagcctcggtttcaagttctgaggaaaaaattatcatataaaataaatcatccacatatatattcaatattttattttattgttattgttatattttttatctgatctattttctgtatcataatctgaggttgatgaattaatttcatgtatagtgtttttatttgagtttggtgaaatactgccaagatggtgagctgtttgtttgagtttgaaatttctttaattcaatcacttttttcttc

SEQ ID NO: 104 - DNA, 1337 bp, Arabidopsis thaliana
  source 1..1337: mol_type = genomic DNA
ttaaagtaatgacttttttttatatgatatattctcaattttgttactcggaaacaatagaaaggataacgaatcgtttctcttcgatcgaaagaatatatatttggaagttttctctgcttttttgttttcgtttgatagaatgggaacagttctcgattcgcattttctggctctcactgctattgtcactgtgatttaccagttcatattcttcgtaatcacggctcttttcaaatttgatcaagtcactgactttgctggtagcacaaacttcgttatacttgctgtgttaacacttgttctcaaagcctcttggcattttcgacagatagtattgactttgctagttgtggtatggggtcttcgcttggggattttccttctaatgaggatcttgcaatggggggaagatcgtcgctttgatgaacagcgtggaaatatagtgagactaatcattttctggactcttcaggctgtgtgggtttggacggttagcttacctttaacacttgttaatgcaagtgatggtggtggatctcttaaacccgcagatgttatcggttggactatgtgggttttcggtttcttgattgaagctgcagctgatcaacagaagctatcattcaaaaactctcctgaaaacagaggaaaatggtgtgatgttggagtctggaagtattcaagacatccaaactacttcggtgagatgttactgtggtggggaatctttgtggctgcatcgcctgtgcttgaaggtgcagagtatcttgtcatattcggaccactctttctcactttgctacttctattcgtcagcggcataccattactcgaggcatcggctgacaaaaaacatggaaactcaggagcttacagatcctacaagaagacaacaagtcctctgattctgttcccaagaggagtgtatgggaacttaccaggatggttcaagacggtctttctcttcgagtttccattttacagccgaaatctccctcaagagggtagactccaaaacagcaaagagaaagaagtaaaagatgactgatttgtgatactcatatttgagttattgttcttcacaacactctttgataaaatttgtgtaaaaaattgcccgtaagaaactgaatttgtttgaaatattggacagtcttgacagattatctcagttgtatttggttcttttttttatgtgattttgttttttggttaaaaaaagttcccattccaagaatcgaacccgggtctcctgggtgaaagccaaatatcctaaccgctggacgacatcggatttgattatttgattatttaattactttatatgttgattt

SEQ ID NO: 105 - DNA, 1079 bp, Arabidopsis thaliana
  source 1..1079: mol_type = genomic DNA
gaagagtaagagtaaaaaacaaaaccttcgtctctaacaaatgtgtggcagctgattgaaactagtagtggtgaaggagaaggagaatgggagatctctacgctttggacttcgatggagttctctgtgatagttgtggagaaagctctctatctgctgttaaggcagccaaagtgagatggcctgatttgttcgaaggagttgattccgctttagaggaatggatcgtcgatcaaatgcatattgtgagacctgtggttgaaactggctatgaaaatcttctacttgtgcggctgttattggagaccaagataccgtctattcgaaaatcttcagttgcagaggggttgacggttgatgggatactggagagctgggcaaagtttaagcccgtgatcatggaagcttgggatgaagatagagatgctttggtagatttgtttggaaaagttagagatgattggattaacaaggacttgacaacttggattggtgccaatagattctacccaggagtttcagatgcactgaaatttgccagctcaaagatttatatcgttaccacgaaacagggccgctttgcagaagcgttactgcgtgaaatagcaggtgtaatcataccatcagaaaggatttatggtttgggttcagggccaaaggtggaagttctaaagctacttcaagataaaccagaacatcagggcttgacgctgcatttcgtggaagacagactcgcaacgctgaaaaatgtcataaaagagcctgaattagacaaatggagtttatacctaggaacctggggatacaacactgagaaagagagagctgaagcagcaggcattcccaggattcaggttattgagctctccacgtttagcaataagcttaaatgagtgcatatactcattggaaaagaaacaaagctttcctctttattgtattctacggcattcaacggaaactaaaaaccaaacatgtttaggtaagattcagtaaaagagttgaactttcagtactacccattatagaagcttttctgtgacctataattcatccttagtaagatcattcttgttacc

SEQ ID NO: 106 - DNA, 1064 bp, Arabidopsis thaliana
  source 1..1064: mol_type = genomic DNA
gaagagtaagagtaaaaaacaaaaccttcgtctctaacaaatgtgtggcagctgattgaaactagtagtggtgaaggagaaggagaatgggagatctctacgctttggacttcgatggagttctctgtgatagttgtggagaaagctctctatctgctgttaaggcagccaaagtgagatggcctgatttgttcgaaggagttgattccgctttagaggaatggatcgtcgatcaaatgcatattgtgagacctgtggttgaaactggctatgaaaatcttctacttgtgcggctgttattggagaccaagataccgtctattcgaaaatcttcagttgcagaggggttgacggttgatgggatactggagagctgggcaaagtttaagcccgtgatcatggaagcttgggatgaagatagagatgctttggtagatttgtttggaaaagttagagatgattggattaacaaggacttgacaacttggattggtgccaatagattctacccaggagtttcagatgcactgaaatttgccagctcaaagatttatatcgttaccacgaaacagggccgctttgcagaagcgttactgcgtgaaatagcaggtgtaatcataccatcagaaaggatttatggtttgggttcagggccaaaggtggaagttctaaagctacttcaagataaaccagaacatcagggcttgacgctgcaactcgcaacgctgaaaaatgtcataaaagagcctgaattagacaaatggagtttatacctaggaacctggggatacaacactgagaaagagagagctgaagcagcaggcattcccaggattcaggttattgagctctccacgtttagcaataagcttaaatgagtgcatatactcattggaaaagaaacaaagctttcctctttattgtattctacggcattcaacggaaactaaaaaccaaacatgtttaggtaagattcagtaaaagagttgaactttcagtactacccattatagaagcttttctgtgacctataattcatccttagtaagatcattcttgttacc

SEQ ID NO: 107 - DNA, 1133 bp, Arabidopsis thaliana
  source 1..1133: mol_type = genomic DNA
gcagctgattgaaactagtagtggtgaaggagaaggagaatgggagatctctacgctttggacttcgatggagttctctgtgatagttgtggagaaagctctctatctgctgttaaggcagccaaagtgagatggcctgatttgttcgaaggagttgattccgctttagaggaatggatcgtcgatcaaatgcatattgtgagacctgtggttgaaactggctatgaaaatcttctacttgtgcggctgttattggagaccaagataccgtctattcgaaaatcttcagttgcagaggggttgacggttgatgggatactggagagctgggcaaagtttaagcccgtgatcatggaagcttgggatgaagatagagatgctttggtagatttgtttggaaaagttagagatgattggattaacaaggacttgacaacttggattggtgccaatagattctacccaggagtttcagatgcactgaaatttgccagctcaaagatttatatcgttaccacgaaacagggccgctttgcagaagcgttactgcgtgaaatagcaggtgtaatcataccatcagaaaggatttatggtttgggttcagggccaaaggtggaagttctaaagctacttcaagataaaccagaacatcagggcttgacgctgcagtaactcacgttctatatatctatcaataattcttctatctgcatgacttggtaatggtcaccattagtttacaatccctatgcatttttaatttggccagtttcgtggaagacagactcgcaacgctgaaaaatgtcataaaagagcctgaattagacaaatggagtttatacctaggaacctggggatacaacactgagaaagagagagctgaagcagcaggcattcccaggattcaggttattgagctctccacgtttagcaataagcttaaatgagtgcatatactcattggaaaagaaacaaagctttcctctttattgtattctacggcattcaacggaaactaaaaaccaaacatgtttaggtaagattcagtaaaagagttgaactttcagtactacccattatagaagcttttctgtgacctataattcatccttagtaagatcattcttgttacc

SEQ ID NO: 108 - DNA, 700 bp, Arabidopsis thaliana
  source 1..700: mol_type = genomic DNA
acatcttctcttttcttccccagcaaaaaatgagtctgcaaaatagaaaattcaagctgcgattgcgaggaagagaagagacttcagatctagcttgatccggtgataatggcgctcgagtgggtggttttaggttacgcggcggcggctgaagcgattatggtggtgctattgacgatgccaggactcgacggactccgcaagggattagtcgccgtcacgcgtaatctcctcaaaccgtttctctccatagttcctttctgtctcttcctcttaatggacatctactggaaatacgaaactatgccttcgtgcgatggcgattcctgcacaccgtcagagcatcttcgtcaccagaagtccatgatgaaatcccagcgaaacgcgcttctcattgcggctgcacttgtgttctactggatcctttactcagtcaccaatttggttgtcaagatcgagcatcttaaccagaggatcgagaggctcaggaacaaggattgatcgtctcgtctcaggttcaattagtgtaatgccttttttggttatctttcccatttggctaggttttctctttttcaacgtttctgatatgtgtcttttatcttgtggagattgaaggattttatcctacttttctatgtttggattcttatttgtaaccagattgtgattgtttcttgttgaattttgattgactcta

SEQ ID NO: 109 - DNA, 1754 bp, Arabidopsis thaliana
  source 1..1754: mol_type = genomic DNA
tctccacaaacaaacttgtactagaaaaatccctaaatctcaacaaaaccctaatttcaaggaagacgaagaaagaatgagttacagagtcgctaaagcatcgcagtatcttgcgatcaccggtggtgggatcacagacatcaagcttgcaaagaagtcttgggtgtttccatggcagtcttgcaccgtcttcgacgtttctccggtgaactacacgttcgaggttcaagctatgagttccgagaaacttccctttgttattcctgctgttttcacaatcggtcctcgcgttgatgatcctcacgctctcttgttgtatgccatgcttatgtctcaacacgataagcactcgaatcacgtcaatgagcttgttcagggtgttatcgaaggagagactcgtgttcttgttgcttccatgactatggaagaggtcttcaaaggaacaaaggagtttaagaaggaagtgtttgacaaggttcagctagagctaaaccagtttggtcttgtgatctacaacgccaatgtgaagcagcttgttgatgtgcctggacatgagtacttctcttacttgggccagaagactcagatggaagcagcaaaccaagccaagatcgatgtagcagaggcaaagatgaagggagaggttggtgccaaagaaaggactggactcacaatccagaatgcagccaagattgacgctgagtcaaagatcatctctactcaaaggctaggagaagggacaaaagaggagatcaaggtgaagactgaagtcaaagtgtttcagaatgagaaagaggctcttgttgctaaggctgatgcagcacttgcgattcaaaaggctgctttgtcccaaaactctcgtgtggctgaggttgaagcagccaaggctgttgctttgagggaagctgagcttcagactaaagtagagaagatgaatgcattgactcggacagagaagcttaaagctgagttcctcagtaaagccagtgttgagtatgaaactaaggtgcaagaagcgaactgggagttgtacaataagcaaaagcaagcagaagctgttctttacgagaagcagaagcaagcggaagcgacgaaagctgcagctgatgctgccttctattcaaaacagaaagatgcagagggacttgtcgcaatggccgatgctcaggggacttacctcaagaccctcttaggcgcagttaacaatgattactcagccatgagagacttcttgatgatcaacaatggcatttatcaggatattgccaagaccaatgctgttgcgatcagggacctgcagcctaagatcagcgtgtggaaccatggtggtgctgagcaggggatgaacggtggtggtaaagctacgatgaacgatattgctggactctacaagatgttaccaccggttcttgatacggtttatgagcagacagggatgcagccaccagcttggattggtacattgcgtggtgctgagcccaaacaatcacttcatgctcaacaacacagaggttgagatctcaaatgttgcttctttaattatacttttagctgttggggtttgttttctttttcttatgttatagaacttggaagttagagtttgaagttaaaacaatagtatctgacaaatgcgacttcgactagtgatttcgataaggatgtgtttttcctttttcaaatgtcagatttattattgcgtgttgaagatacctttcttctctcttgatacactaatataaataacatgttta

SEQ ID NO: 110 - DNA, 683 bp, Arabidopsis thaliana
  source 1..683: mol_type = genomic DNA
cacagaaccctccctctctagctctaaaaacatcccacaaactatctttcaacaacacaagacatatcacgaaacaaatcaaagcaaagatcatgaacacgattccagccgaactcactggatacttccactatctaccaccagataaatataataaccaaacaccaatcatggagtctgagtacttcaacatgccctcttctcctacttcttgttcctccttctaccacctcaatggtctgatcaacaacaacaactactcttcatcatccaatggtcaggatctaatgacgagcaacaactcaacttcagacgaagatcaccaacaaagtatggtcatcgatgagaggaaacaaaggagaatgatctctaacagggaatctgctcgtaggtcaagaatgagaaagcagagacatctcgatgagctttggtctcaagtgataagacttcgcactgataaccactgtcttatggataagctgaaccgcgtatctgaaagccatgagcttgctttaaaggagaacgctaagcttaaagaggaaacttctgatctcagacagctgatctctgagataaagtcacacaacgaagacgacaacagttttttaagagagctcgaagattcgatatcaaactctagatcggattcgaaccaaagcggcagagattttgagttgtgttaa

SEQ ID NO: 111 - DNA, 432 bp, Arabidopsis thaliana
  source 1..432: mol_type = genomic DNA
taagctagaggtttttagttctctgtgtggagtacggctgcattgtttctaccagtaatttgtgggatttccaagctccagtttttcgaatatggcggaagtaagtcttggtatgcttatagacattgtggacgaagagtggatgagggacactttgcctgatgatgatcttccattgcctccagtgcttgctgttaaaactgatgatactgaagaaaccaatcaggaaactcagcaagcagatgctgaaacttggcgtgatctagctcttgatacacagtaatagcctcttaagtacaatggaaaattcttacaagtcttgtttctcgttgtgtatgatcaaaaccaaaactgttcctggctttgtatttttttttggtagaagaggggggcgaacccccatttttattaaaactgaaaaactaaaaaaaa

SEQ ID NO: 112 - DNA, 3538 bp, Arabidopsis thaliana
  source 1..3538: mol_type = genomic DNA
gaagtagaagaagagaagtatctggagagagagaggcgtgcgatttccgcatcgaagaaacagtacggagttttatccgctccgattctgtggaagataatggggaaaggaggtgaagattgcgggaataagcaaactaatagttctgaattggtcaagtctgatacttttcctgcttggggtaaagatgtgtcggaatgcgaagagaagtttggtgttagtcgtgagaaaggtttgagcactgatgaggtgttgaaacggcatcagatctatggtttgaatgaattagagaagcctgagggtacttctatttttaagctgattttggaacagtttaatgatacattggttcgtattcttttggcggctgctgttatttcctttgtcttagccttctttgatggcgacgaaggtggtgagatgggtatcaccgcatttgttgagccgcttgttatttttctcatcttgattgttaatgccattgttggcatctggcaagaaactaatgctgagaaggcgttggaagctttgaaagagattcagtctcagcaagctaccgtcatgcgtgatgggactaaggtttccagtttgcctgcaaaggagcttgttcctggtgatattgtggaactgagggttggtgataaggtgcctgctgatatgcgtgtggttgctttgatcagttcaactttgagagtcgagcaggggtccttaacaggagagagtgaggcagtgagcaaaaccaccaagcacgtggatgagaatgctgatattcaaggaaagaaatgcatggtgtttgcaggaaccactgtcgtgaatgggaactgcatatgtttagttacagatactgggatgaatactgagattggaagggttcactcacagatccaggaagctgcacaacacgaggaagatacccctctgaagaaaaaacttaacgagtttggggaagttctgactatgatcattgggttaatttgtgcgttagtgtggctcatcaatgtcaaatactttctgtcatgggagtatgttgatggctggcccagaaactttaagttctccttcgagaagtgcacatattactttgagattgctgttgcactggcggttgctgcaattccagaaggtctgccagcagttattaccacatgtttggctcttggcactaggaagatggctcagaagaatgctctggttaggaagctacccagtgtggagactcttggatgcaccaccgtgatatgctctgacaaaactggaactcttacaaccaatcagatggctgtttcaaagctcgttgctatgggttcgaggatcggaactcttcgatctttcaatgttgaggggacctcgtttgatcctcgagatggaaagattgaagattggccaacgggtcggatggatgcaaatcttcagatgattgcaaaaattgctgccatttgcaacgatgctaatgttgagaaatctgatcagcaatttgtgtctaggggcatgcctactgaggcagctttgaaggttttggttgagaaaatgggatttcccgaaggattgaatgaagcttcatccgatggcaatgtcttacgttgttgtcggctatggagtgaactagaacaacggattgccacccttgagtttgaccgtgaccggaaatcaatgggagttatggtggattccagctcaggaaagaaactgctactggtcaagggtgccgtagaaaatgtattggaaaggagtacccatattcagctacttgatggttccactcgagagcttgaccaatactcaagggatcttattttacaaagcctacatgatatgtccttgagtgcattaagatgtctcggatttgcatactcagatgttccatcagattttgccacttatgatggcagtgaagaccatcctgctcatcagcaacttctcaacccatccaattattcatcaattgagtccaatctagtatttgttggatttgttggtttaagggatcctccaaggaaagaggtgcgtcaagccattgcagactgcagaacagcaggtattcgggtcatggttatcaccggagacaacaagagcacagcggaagcaatctgccgtgaaattggcgtatttgaagcagatgaagatatctcctcgagaagcttgacaggaaaagaatttatggatgttaaagatcagaagaatcatctaagacagacaggagggctcctgttctcaagggctgaaccaaaacacaaacaagagattgtcaggttactgaaagaagatggagaagtggttgccatgactggagatggagtcaatgatgctcctgccctgaagttggctgatattggtgtggctatgggcatttccgggacagaggtagcaaaggaggcatctgacttggtgttggcagatgataatttcagcaccattgttgcagctgttggtgaaggcaggtccatctataacaacatgaaggccttcatcaggtacatgatctcttccaacatcggtgaggttgcatcgatattcttgacagctgctcttggaatcccagaaggcatgatacccgttcaacttctgtgggtgaatctcgtaacagatggtcctccagctactgctttgggattcaacccccctgacaaggatattatgaaaaagcctcctcgtaggagcgatgactctcttatcactgcgtggatcctcttccgctatatggtgattggtttgtatgtgggagtagcaacggtgggagtattcatcatatggtacacacacaacagctttatgggcatagacctgagccaagacggtcacagccttgtgagctattcacagctcgcacattggggccaatgctcttcatgggaaggcttcaaagtgtctcctttcacagcaggctctcagactttctcgttcgactcaaacccttgcgactattttcagcagggtaaaatcaaggcatccacactctccctctcggtgttggtggccattgaaatgttcaactctctgaatgcactctcagaagatggcagcctggtgacgatgccaccctgggttaacccgtggctgctcctggcaatggctgtctcatttggactccactttgtgatattgtacgtcccattcttggctcaggtgtttggtattgtgccactgagcttgaacgagtggctgctagtgctggctgtgtcgctgccggtaattttgatagacgaagtgctcaagtttgtaggaaggtgcacgagtggctaccgctactcacctcgcactccctcagctaagcaaaaggaggagtaagaaaataattcaaaaggcattattattagactcttagttttagctgaaattaactttgttgctttactcatccttgctatatttaattctccaaacgataatttttggtttgaaaaagaaaagtttctaactttggttcatggacacagcccgtgatagaaagatgaatgtttcaaccaaaccttgattctttatgtaaacttttatggtcgaccaaattggtttttaagactgatggtaatttattttgggc

SEQ ID NO: 113 - DNA, 2087 bp, Arabidopsis thaliana
  source 1..2087: mol_type = genomic DNA
ataaacctacttcctttccttgcttcagctccccttttcttatccggaaaccaaaaacttccggtgataaaacctccttcgtcatctctctacttcttgctgaattttgtctgtctttgaagtggataaaatggcgtcaactttcactgccacatcttctattggttcaatggttgctccgaatggtcacaaatctgataagaaacttatcagcaagttgtcttcaagctcatttggaaggagacaaagtgtgtgtcctagacccagaagatccagttctgcaattgtgtgcgcagcaaaggaattacatttcaacaaagatgggactaccattaggagacttcaagctggtgtcaacaagctcgcagatcttgttggtgttacacttggacccaaaggacgaaatgttgttcttgagagcaagtatggatcaccacgaattgttaatgatggtgtgactgttgcaagagaggttgagttggaagacccggttgagaacattggcgctaagcttgtgaggcaagcggctgccaaaaccaatgacttggctggtgacggtacaacaacatctgttgttcttgcacaaggttttatcgctgagggtgtcaaggtggtagctgctggtgcaaaccctgttttgatcaccagaggtattgagaagacagcaaaggctttggttaccgagctcaagaaaatgtctaaggaggttgaagacagtgaacttgcagatgttgcagctgttagtgcgggtaacaacgacgaaattggaaatatgattgctgaagcaatgagcaaagtgggcaggaaaggtgtggtgacccttgaggagggtaaaagtgccgagaacaacctctacgtcgtagaaggaatgcaatttgaccgtggttatatctctccttactttgtgacagacagcgagaaaatgtccgtcgagttcgacaattgcaagttacttctcgttgacaagaaaattaccaatgcaagggatcttgttggtgttttggaggatgcaattagaggcggatacccaatattaattattgctgaagacattgaacaagaagctttagcgactcttgttgtaaacaagcttagaggtacactgaagatagcagctctcagagctccagggtttggagagcgcaagagccaataccttgatgatattgccattctaactggagcaactgtgatccgtgaggaagttggtctttcacttgacaaagctggaaaagaggttcttggtaatgcttcaaaggttgtcctcacaaaggagacctcgaccatagtgggtgatggaagcacacaggatgcagtgaaaaagcgtgttacacagattaaaaatcttattgagcaagcggagcaagattacgagaaggagaaactcaatgagagaattgcaaagctctctggtggagttgctgtgattcaggttggagcacaaactgagacagaactcaaagagaagaagttgagagttgaagatgctcttaatgcaacaaaggccgctgtcgaggaaggtattgttgttggtggtggttgcactctgcttcgtcttgcttccaaggttgatgccattaaagccacgcttgataatgatgaagaaaaggttggagcggatatagttaaaagagcactaagttaccccctaaaactaatcgccaagaatgctggtgttaatggaagtgtagttagcgagaaggtgctttccaacgataacgtgaaattcggttacaatgctgcaaccggcaagtacgaggatttgatggctgcaggaatcatcgatccaacaaaggttgtgagatgttgcttggaacacgcagcttcggttgcaaagactttcttgatgtcggactgcgttgttgttgagatcaaggaacctgaaccagttcccgtcggcaacccaatggacaactcaggatatggatactaagaggagataggctaatattgaaacggattactttagcttgcgagtgtaatgattttgaacaagagaatgtgtaatgtgaaactgaaattttgaattaatcatcatatgaataaatcatgattccctcaatgcttcgaaatatctcgaaatcgcc

SEQ ID NO: 114 - DNA, 2093 bp, Arabidopsis thaliana
  source 1..2093: mol_type = genomic DNA
ttaaaagcaccttccaagcgagagtaaggagataaacctacttcctttccttgcttcagctccccttttcttatccggaaaccaaaaacttccggtgataaaacctccttcgtcatctctctacttcttggataaaatggcgtcaactttcactgccacatcttctattggttcaatggttgctccgaatggtcacaaatctgataagaaacttatcagcaagttgtcttcaagctcatttggaaggagacaaagtgtgtgtcctagacccagaagatccagttctgcaattgtgtgcgcagcaaaggaattacatttcaacaaagatgggactaccattaggagacttcaagctggtgtcaacaagctcgcagatcttgttggtgttacacttggacccaaaggacgaaatgttgttcttgagagcaagtatggatcaccacgaattgttaatgatggtgtgactgttgcaagagaggttgagttggaagacccggttgagaacattggcgctaagcttgtgaggcaagcggctgccaaaaccaatgacttggctggtgacggtacaacaacatctgttgttcttgcacaaggttttatcgctgagggtgtcaaggtggtagctgctggtgcaaaccctgttttgatcaccagaggtattgagaagacagcaaaggctttggttaccgagctcaagaaaatgtctaaggaggttgaagacagtgaacttgcagatgttgcagctgttagtgcgggtaacaacgacgaaattggaaatatgattgctgaagcaatgagcaaagtgggcaggaaaggtgtggtgacccttgaggagggtaaaagtgccgagaacaacctctacgtcgtagaaggaatgcaatttgaccgtggttatatctctccttactttgtgacagacagcgagaaaatgtccgtcgagttcgacaattgcaagttacttctcgttgacaagaaaattaccaatgcaagggatcttgttggtgttttggaggatgcaattagaggcggatacccaatattaattattgctgaagacattgaacaagaagctttagcgactcttgttgtaaacaagcttagaggtacactgaagatagcagctctcagagctccagggtttggagagcgcaagagccaataccttgatgatattgccattctaactggagcaactgtgatccgtgaggaagttggtctttcacttgacaaagctggaaaagaggttcttggtaatgcttcaaaggttgtcctcacaaaggagacctcgaccatagtgggtgatggaagcacacaggatgcagtgaaaaagcgtgttacacagattaaaaatcttattgagcaagcggagcaagattacgagaaggagaaactcaatgagagaattgcaaagctctctggtggagttgctgtgattcaggttggagcacaaactgagacagaactcaaagagaagaagttgagagttgaagatgctcttaatgcaacaaaggccgctgtcgaggaaggtattgttgttggtggtggttgcactctgcttcgtcttgcttccaaggttgatgccattaaagccacgcttgataatgatgaagaaaaggttggagcggatatagttaaaagagcactaagttaccccctaaaactaatcgccaagaatgctggtgttaatggaagtgtagttagcgagaaggtgctttccaacgataacgtgaaattcggttacaatgctgcaaccggcaagtacgaggatttgatggctgcaggaatcatcgatccaacaaaggttgtgagatgttgcttggaacacgcagcttcggttgcaaagactttcttgatgtcggactgcgttgttgttgagatcaaggaacctgaaccagttcccgtcggcaacccaatggacaactcaggatatggatactaagaggagataggctaatattgaaacggattactttagcttgcgagtgtaatgattttgaacaagagaatgtgtaatgtgaaactgaaattttgaattaatcatcatatgaataaatcatgattccctcaatgcttcgaaatatctcgaaatcgcc

SEQ ID NO: 115 - DNA, 1960 bp, Arabidopsis thaliana
  source 1..1960: mol_type = genomic DNA
gtgaacgaagataaatttcgctattcctctctctctctctctctctctctctctctctctctctcttcttcttcttctccgttcgtgctctggactcgctcgaaatcgatccgatgataatttatgcagctcgaaacttaatttagaatcatacctttttctggatttggctgacgaatccgttttcaattgcacgagttgcttcgccaggtttatcaacttaagaatgtctaattatcaaggggatgatgctgagtacatggaagatgtggatgatgaaatggatgaggatgatttagatgaggattttcgtggggatgatatggctgcctctgattccgatgtcgatgagtttgactactctaataataaaatagctgacacttcagctgaccaagcccggaaagggaaagacatccaggggattccttgggacaggcttagtattacgagagagacatacagacaaactagactagaacagtataaaaattatgaaaatgtccctaactctggggaatcttcagggaaagattgcatggccacacagaaaggggctcttttttatgatttctggcggaatacaagatctatcaaatcaagtattcttcatttccagttgaggaatttggtttgggcaacttctaagcacgatgtctaccttatgtcacaatatttggtgagccactattctactttgacatccggaaagcatgatgttctcaatgttcaaggtcatgtttccccatctgagaaacatcctggaagtttgttggagggatttacaaagactcaagtgagtacactcgcagtgagagataaatttttagttgccggtggatttcaaggagaacttatatgcaagcatcttgatagacctggtgtgagcttttgttcacgtactacttatgatgataatgctataaccaatgctattgagatttataacaaacccagtggggcacttcattttactgcgtcgaataatgattgtggagtcagagattttgatatggagagataccagcttgttaaccagtttcgctttccatggccggtgaatcacacatctttaagtcctgatggtaaattgttgacgattgtgggagacaaccctgaaagccttctggtagaccccaacactggaaagacactggcaacgctatcaggacatctggacttttcctttgcatcagcatggcacccagatggattcacgttctccacaggtaaccaggacaagacctgccgggtttgggacattcgtaacctgtcaaaatctgttgctgtcttgaggggtaaccttggagcaatccgatccattcgctacacatctgatgggaagtacatggccatggctgagccggctgactttgtccatgtgtatgatgtctcaaacgggtatgaaacggagcaagagatcgacttctttggggagatctcgggaatatcatttagccccgacacagaagcactcttcataggcgtttgggaccgcacttacggaagtctaattgagtatagccggcgccacaactactcctaccttgattcatttctatgatcacccgacataccagaggaataaaagagccgatacatatgtgctgctgcactctcctgtcgctctgttaaactaagaaacccgagaaaagagaaaacataaactcaagtcgatctctaatggtgtaaatgatgtgttgtgcaagtactagtaggaatgttgtcacagagagcggatttagttagttaatgttcatttcttgtatgagtgttggagttcgtgtattgtacataagtatatgaggttcgggtgagtttgcatcaagtctcaactcttggcaaagagacaactttactcgagtctgtggctcgttatttggctatggtcacttgtagaggaactcaatttgagatgtttctgccgattgttggatcaaattatatatcatgatgtttc

SEQ ID NO: 116 - DNA, 2741 bp, Arabidopsis thaliana
  source 1..2741: mol_type = genomic DNA
aatcggcgcgtgatcgagaaagatcttctttaacctctttgcaacaaatctactcaaaaccctaacccctttttcaaattacttccatctttagatcgaatcaaatcaatgtccgtcgacgatctccctccgtcgtcggcctccgccgtaacgccactaggctcctccgtgattccgattgtgaacaagctccaagacatattcgctcagctaggaagtcaatcgacgatcgctcttccgcaagtagctgtcgtcggaagtcaaagcagtggcaaatccagcgttctagaagctctcgtcggccgtgactttcttcctcgtggcaatgatatttgcacgcgccgacctctccgtctccagcttgttcagacgaaacctagctctgatggtggatccgatgaagagtggggcgagtttcttcaccacgatcctgttagacgtatctacgatttctctgagattcgccgtgagattgaggcggagactaatagagtatcaggagagaacaaaggtgtatcagatattccgattggtttgaagatattttcacctaatgttttggatattagtcttgtggatcttcctggtatcactaaggttcctgttggtgatcagccaagtgatatcgaagcgcgtataagaacgatgatcttgacttacattaaggaacctagttgcttgatacttgctgttagccctgctaatactgatttagcaaattcagatgcattacaaatcgcaggaaatgctgatcctgatggtcatagaaccataggtgtaatcacaaagttggatattatggacagaggtactgatgctcggaatcaccttctgggaaaaacaattcctcttcgacttggatacgtgggagttgtaaatcgtagtcaagaggatattttgatgaaccgtagcatcaaggatgctcttgttgcagaggaaaagttctttcgtagtcgtccagtttacagcggtctcacagatcgtttgggtgtccctcaactggcaaagaaattaaatcaggtccttgttcaacacatcaaggcactgcttcctagtttaaagtcacgtatcaacaatgcattgtttgctacagcaaaggagtatgagagctatggggatataacagagtctaggggtggtcaaggagctcttctcctcagttttattacaaaatactgcgaagcatactcctctaccctggaagggaaaagtaaagaaatgtcaacatctgagctctcgggtggagcaagaattctctacattttccaatcagtatttgttaagagcttagaggaggttgatccatgtgaagacttaacagctgatgatattcggactgcaatacaaaatgcaactggtcccagatctgcattatttgttccagatgttccatttgaagttcttgtcaggaggcaaatatctcgtttattagatcccagccttcagtgcgctaggttcatcttcgatgagctagtaaagattagtcatcagtgtatgatgaaagagttacagcggtttccagtcctgcaaaagcgcatggatgaggttattgggaactttctgcgagaaggtcttgaaccttcgcaggcaatgatccgagatcttattgaaatggagatggattatataaacacctcacacccaaattttatcgggggaactaaagccgtggagcaagcaatgcaaacagtcaaatcttctaggattccgcatcctgttgcgcggccaagggatactgtggagcctgagaggacggcttcttccgggagtcaaataaaaacccgatcttttctcggccgacaagctaatggaatcatcactgatcaggcagttccaactgcagcagatgctgaaagacctgcaccagctggaagcacaagctggagtggtttctcatcaatttttcgggggagtgatggtcaggcagctgctaaaaacaacctattaaacaaaccattcagcgaaactactcaagaagtgtatcagaacttgtcaacaatctatttaaaggagcctccaactattttgaagtcatctgaaactcattcagaacaggagtcagttgagattgagataacaaagctattattgaaatcctactatgacattgtaaggaagaatgtcgaggacttggtcccaaaagcaatcatgcattttctggtaaattacacgaaacgtgagctgcacaatgttttcatcgagaagctttacagggagaacttaattgaagaactgttgaaagagcccgatgagttagcgataaagaggaaacgcacgcaagagactcttcgcattcttcagcaggctaatcggacgttagacgagctgccgttagaagctgaatcggtcgagagaggttacaaaattggttcagaagcgaaacatgaggagttaccgggcacaagaagatcaaggacagaaactaatgggaacggacggcttcatatgtaaattcaaattgtgattgcacgcatgactcattcatttggtgatggaaaagatttgttttcttccctttaaatcggttgtgcgtggggaaagaaaggtgttcttaggtatagtgaaacgtgatgataaacagaggttttgttgtgagggtattatcaacctactggaaaatgtgacttaatatttgtttctcaaaaccgagaagaataatcaattcctaattttacttttcatagctttatttgttacgaaaaacaagaacgtacatgagacaatgtaatgataaatttatc

SEQ ID NO: 117 - DNA, 2749 bp, Arabidopsis thaliana
  source 1..2749: mol_type = genomic DNA
gagaaagatcttctttaacctctttgcaacaaatctactcaaaaccctaacccctttttcaaattacttccatctttagatcgaatcaaatcaatgtccgtcgacgatctccctccgtcgtcggcctccgccgtaacgccactaggctcctccgtgattccgattgtgaacaagctccaagacatattcgctcagctaggaagtcaatcgacgatcgctcttccgcaagtagctgtcgtcggaagtcaaagcagtggcaaatccagcgttctagaagctctcgtcggccgtgactttcttcctcgtggcaatgatatttgcacgcgccgacctctccgtctccagcttgttcagacgaaacctagctctgatggtggatccgatgaagagtggggcgagtttcttcaccacgatcctgttagacgtatctacgatttctctgagattcgccgtgagattgaggcggagactaatagagtatcaggagagaacaaaggtgtatcagatattccgattggtttgaagatattttcacctaatgttttggatattagtcttgtggatcttcctggtatcactaaggttcctgttggtgatcagccaagtgatatcgaagcgcgtataagaacgatgatcttgacttacattaaggaacctagttgcttgatacttgctgttagccctgctaatactgatttagcaaattcagatgcattacaaatcgcaggaaatgctgatcctgatggtcatagaaccataggtgtaatcacaaagttggatattatggacagaggtactgatgctcggaatcaccttctgggaaaaacaattcctcttcgacttggatacgtgggagttgtaaatcgtagtcaagaggatattttgatgaaccgtagcatcaaggatgctcttgttgcagaggaaaagttctttcgtagtcgtccagtttacagcggtctcacagatcgtttgggtgtccctcaactggcaaagaaattaaatcaggtccttgttcaacacatcaaggcactgcttcctagtttaaagtcacgtatcaacaatgcattgtttgctacagcaaaggagtatgagagctatggggatataacagagtctaggggtggtcaaggagctcttctcctcagttttattacaaaatactgcgaagcatactcctctaccctggaagggaaaagtaaagaaatgtcaacatctgagctctcgggtggagcaagaattctctacattttccaatcagtatttgttaagagcttagaggaggttgatccatgtgaagacttaacagctgatgatattcggactgcaatacaaaatgcaactggtcccagatctgcattatttgttccagatgttccatttgaagttcttgtcaggaggcaaatatctcgtttattagatcccagccttcagtgcgctaggttcatcttcgatgagctagtaaagattagtcatcagtgtatgatgaaagagttacagcggtttccagtcctgcaaaagcgcatggatgaggttattgggaactttctgcgagaaggtcttgaaccttcgcaggcaatgatccgagatcttattgaaatggagatggattatataaacacctcacacccaaattttatcgggggaactaaagccgtggagcaagcaatgcaaacagtcaaatcttctaggattccgcatcctgttgcgcggccaagggatactgtggagcctgagaggacggcttcttccgggagtcaaataaaaacccgatcttttctcggccgacaagctaatggaatcatcactgatcaggcatttccaactgcagcagatgctgaaagacctgcaccagctggaagcacaagctggagtggtttctcatcaatttttcgggggagtgatggtcaggcagctgctaaaaacaacctattaaacaaaccattcagcgaaactactcaagaagtgtatcagaacttgtcaacaatctatttaaaggagcctccaactattttgaagtcatctgaaactcattcagaacaggagtcagttgagattgagataacaaagctattattgaaatcctactatgacattgtaaggaagaatgtcgaggacttggtcccaaaagcaatcatgcattttctggtaaattacacgaaacgtgagctgcacaatgttttcatcgagaagctttacagggagaacttaattgaagaactgttgaaagagcccgatgagttagcgataaagaggaaacgcacgcaagagactcttcgcattcttcagcaggctaatcggacgttagacgagctgccgttagaagctgaatcggtcgagagaggttacaaaattggttcagaagcgaaacatgaggagttaccgggcacaagaagatcaaggacagaaactaatgggaacggacggcttcatatgtaaattcaaattgtgattgcacgcatgactcattcatttggtgatggaaaagatttgttttcttccctttaaatcggttgtgcgtggggaaagaaaggtgttcttaggtatagtgaaacgtgatgataaacagaggttttgttgtgagggtattatcaacctactggaaaatgtgacttaatatttgtttctcaaaaccgagaagaataatcaattcctaattttacttttcatagctttatttgttacgaaaaacaagaacgtacatgagacaatgtaatgataaatttatcactggtaagttgatcttgttctt

SEQ ID NO: 118 - DNA, 2836 bp, Arabidopsis thaliana
  source 1..2836: mol_type = genomic DNA
gagaaagatcttctttaacctctttgcaacaaatctactcaaaaccctaacccctttttcaaattacttccatctttagatcgaatcaaatcaatgtccgtcgacgatctccctccgtcgtcggcctccgccgtaacgccactaggctcctccgtgattccgattgtgaacaagctccaagacatattcgctcagctaggaagtcaatcgacgatcgctcttccgcaagtagctgtcgtcggaagtcaaagcagtggcaaatccagcgttctagaagctctcgtcggccgtgactttcttcctcgtggcaatgatatttgcacgcgccgacctctccgtctccagcttgttcagacgaaacctagctctgatggtggatccgatgaagagtggggcgagtttcttcaccacgatcctgttagacgtatctacgatttctctgagattcgccgtgagattgaggcggagactaatagagtatcaggagagaacaaaggtgtatcagatattccgattggtttgaagatattttcacctaatgttttggatattagtcttgtggatcttcctggtatcactaaggttcctgttggtgatcagccaagtgatatcgaagcgcgtataagaacgatgatcttgacttacattaaggaacctagttgcttgatacttgctgttagccctgctaatactgatttagcaaattcagatgcattacaaatcgcaggaaatgctgatcctgatggtcatagaaccataggtgtaatcacaaagttggatattatggacagaggtactgatgctcggaatcaccttctgggaaaaacaattcctcttcgacttggatacgtgggagttgtaaatcgtagtcaagaggatattttgatgaaccgtagcatcaaggatgctcttgttgcagaggaaaagttctttcgtagtcgtccagtttacagcggtctcacagatcgtttgggtgtccctcaactggcaaagaaattaaatcaggtccttgttcaacacatcaaggcactgcttcctagtttaaagtcacgtatcaacaatgcattgtttgctacagcaaaggagtatgagagctatggggatataacagagtctaggggtggtcaaggagctcttctcctcagttttattacaaaatactgcgaagcatactcctctaccctggaagggaaaagtaaagaaatgtcaacatctgagctctcgggtggagcaagaattctctacattttccaatcagtatttgttaagagcttagaggtaatcactgtgtgtagatatctttgtttagttagtggggctatttgcacggaaggcagacagttcgtttcaggttttcagttcttggaagttgatccatgtgaagacttaacagctgatgatattcggactgcaatacaaaatgcaactggtcccagatctgcattatttgttccagatgttccatttgaagttcttgtcaggaggcaaatatctcgtttattagatcccagccttcagtgcgctaggttcatcttcgatgagctagtaaagattagtcatcagtgtatgatgaaagagttacagcggtttccagtcctgcaaaagcgcatggatgaggttattgggaactttctgcgagaaggtcttgaaccttcgcaggcaatgatccgagatcttattgaaatggagatggattatataaacacctcacacccaaattttatcgggggaactaaagccgtggagcaagcaatgcaaacagtcaaatcttctaggattccgcatcctgttgcgcggccaagggatactgtggagcctgagaggacggcttcttccgggagtcaaataaaaacccgatcttttctcggccgacaagctaatggaatcatcactgatcaggcagttccaactgcagcagatgctgaaagacctgcaccagctggaagcacaagctggagtggtttctcatcaatttttcgggggagtgatggtcaggcagctgctaaaaacaacctattaaacaaaccattcagcgaaactactcaagaagtgtatcagaacttgtcaacaatctatttaaaggagcctccaactattttgaagtcatctgaaactcattcagaacaggagtcagttgagattgagataacaaagctattattgaaatcctactatgacattgtaaggaagaatgtcgaggacttggtcccaaaagcaatcatgcattttctggtaaattacacgaaacgtgagctgcacaatgttttcatcgagaagctttacagggagaacttaattgaagaactgttgaaagagcccgatgagttagcgataaagaggaaacgcacgcaagagactcttcgcattcttcagcaggctaatcggacgttagacgagctgccgttagaagctgaatcggtcgagagaggttacaaaattggttcagaagcgaaacatgaggagttaccgggcacaagaagatcaaggacagaaactaatgggaacggacggcttcatatgtaaattcaaattgtgattgcacgcatgactcattcatttggtgatggaaaagatttgttttcttccctttaaatcggttgtgcgtggggaaagaaaggtgttcttaggtatagtgaaacgtgatgataaacagaggttttgttgtgagggtattatcaacctactggaaaatgtgacttaatatttgtttctcaaaaccgagaagaataatcaattcctaattttacttttcatagctttatttgttacgaaaaacaagaacgtacatgagacaatgtaatgataaatttatcactggtaagttgatcttgttctt

SEQ ID NO: 119 - DNA, 3430 bp, Arabidopsis thaliana
  source 1..3430: mol_type = genomic DNA
aaactaaaataaataaggaaaacactcttcttcaaatccagtagagagattcaagacgagtctcatcgaaagttcgaatctttcgtcatctgattagctttctcttagggtttatttcgatttcgatttagtgttctccatcaatggcgacacccatggttagttccgctggaggattactagcaatgctcaacgagcctcatcctgttttgaagcttcatgcgctctctaacctcaacaatttggttgaccaattctggcctgagatctccactagtgtccccatcattgagagtttatatgaagatgaagaattcgatctgcatcaaagacagcttgctgctttgctggtctctaaggttttctattacttgggcgagcttaatgattcgctgtcttatgccctaggagccggtcccttatttgatgtttcagaggattctgattatgttcatacgcttctggccaaagcaatagacgaatatgccagtctcagatcaaaggcagttgagtcaaatgagatggtggacattgatcccaggctagaggcgattgttgaaagaatgcttggaaaatgcatcagtgatgggaagtatcaacaagccatgggcattgcgatagaatgccggagattggataagttggaagaagctatcattaagagcgataatgttcagggaactttatcatattgcatcaatgtttctcattcctttgtcaaccgcagagagtacagacatgaggtgcttagtttacttgtaaaagtctaccagaagctgccctctcctgattatttgagcatttgtcaatgcctcatgtttttggatgaaccgcaaggtgttgcaagcatattggagaagcttcttcgctcagagaacaaggatgatgctttattggcattgcaaattgcatttgatcttgtagagaacgagcaccaggcctttctcttgagtgttagagatcgccttccagctcccaaaacacgtgctgtagaagcaactcaggctgttgaaacaactattgctcctaatgagaacccttcgggagatgttcagatggcagatgaaactccagctcagacaattgtgcatgagacggatccagttgatgctacatatgctgagaggttaacaaagattaagggaattttatctggagagacatctattcagctgacactgcagtttctttacagccacaacaaatcggacctgctgatactgaagacaatcaaacagtctgtagagatgcggaacagtgtatgccacagtgctacaatatatgctaatgccattatgcatgctggaactacagtggacactttccttagagagaatttggattggctaagcagggcaaccaattgggctaagttcagtgctaccgcgggattaggtgttattcacagaggtcacctgcaacagggtaggtcattgatggctccatacttgcctcagggaggagcaggtggtggtgggagtccttattccgaaggaggtgctttatatgctcttggccttattcatgctaaccatggcgagggaatcaagcaatttctacgtgatagcctacgcagcactaatgttgaggtcattcaacatggagcttgtttaggtcttggcttgtcagctctcgggacagctgatgaagagatatatgatgatgtcaaaagcgtgctttatactgacagtgcagttgctggtgaagctgctggcatcagcatgggtttattattggttggaactgctactgaaaaggcaagtgagatgctcgcttatgctcatgagacacaacatgagaagataataaggggattggctctaggaatagctcttacagtatatggtagagaagaaggagcagataccttgattgagcagatgacgagagatcaggatccaatcattcgttatggtggcatgtacgcattggcattggcttacagtggaaccgcaaacaacaaggcaattcgacaattgctgcactttgctgtatctgatgtcagtgatgatgttaggaggactgccgttctggcacttggatttgtcttgtactctgatccagagcagactccccgtattgtatcactgctttctgagtcatacaatccacatgttcgctatggtgcggctcttgcagtgggtatttcttgtgcaggcactggcctcagcgaagcgatatccttgttggagccacttacatcagatgttgttgactttgttcgtcaaggtgctttgattgcaatggccatggtgatggttcaaattagcgaagctagcgattctcgtgttggagtatttaggcgccaacttgagaagattatacttgacaagcacgaagatacaatgagcaagatgggagcgattctggcctctggtatccttgatgctggtggtaggaacgttactataagactgctctctaagaccaaacatgacaaagtcactgctgttatcggccttgcagtcttcagccagttttggtattggtacccactgatctatttcattagtttggccttctcaccaaccgctttcatcggtttgaactatgaccttaaggtcccaaagtttgagttcatgtcacatgcaaaaccgtctttatttgagtacccaaaacccaccacggttcctacagccaataccgccgttaaacttccaaccgctgttctctcaacttcagttaaagccaaagctagggctaagaaagaagcagagcaaaaagctattgctgagaaaacatctggccctgaaaagcctgtcaatgaaagtggatctggaaaaggaaaagcatcaactgagaaggaaggagactctatgcaggtcgatagcccagcagcggtcgagaagaaagcacctgagcctgagccagcgtttgagattttagtgaacccagctcgagtagtcccagctcaagagaaatacataaagttacttgatgacagcagatatgtaccagtgaagctagcaccgtcaggtttcgttcttctcaaagacttgcgtgaacacgagccagaggttctctctctgaccgacgcaccaacttcaacagcttctcctgcaactggtacagcagcggctgcacaaggaaccccggcctcagctatggccgtagatgatgagccacaacctccacaagcctttgaatacgcttcatgattttatttcatttaaaattagtgggaatttgttgttggttttattggtttctgttgaaagacaaaaggcagagagaaaaacagatctttgaactttgagataactgcttcttgtcatttgcaactggtttcatgttcaactacgatcttgtattaggtacttctctttttaagtattatctaaataattaagtgtcgttttatgtcttttagtggtactggtatatctgatttcttctacaacaagatagtaataaactacattttctaagt

SEQ ID NO: 120 - DNA, 1570 bp, Arabidopsis thaliana
  source 1..1570: mol_type = genomic DNA
cctcttcctcttcaagccacaaagactcataaaaatccaacctttttctcatttcctctgttaaatttttcctgaaaagtttattcctttttctacagatcgaatttcgtagttctcacctcactgaatctgttactttctctataatctaaatcttcaaaaatgtttctggttttgtgaaatcaacacttaaaaactcgagcttttacctcctctgttttttcaaagataaaaatgagagaagacgattcagactggttcgcaagatgggaagaagaacttccatcaccagaagagctcatgccaatatcacaatctctaatctcacccgatctagctctagccttcgatatacgaaccccaaatcacggaaacggaaactcaaaccaacctcatcatcatcatcatcaccaaaccacacctcctacaccgtctcagcttcagcttccatcttctcaagccaattcctcagccgaattcgctgcagattcagcagatctaggctccggaggagctgccggagacgaaccagctcggactttaaaacgacctcgtcttgtctggacaccgcagctgcataaacgtttcgttgatgctgttgcgcatttagggattaagaacgcagttcctaaaacgattatgcagcttatgagtgttgatggtttaactagagaaaacgttgcgagtcatttgcaaaagtatagactttatcttaagagaatgcaaggtttgtcttctggtggtggtgctggttcagatccagctactgatcgtcttttcgctagctctcctgttcctgctcactttcttcatcctaatcgtgttcccagttctgatcatttcatgccgtcttttgttcctattgctactcttcaacaacaacaacaaatggctgctgctgcggccgctgctgcagcagctaatcctcatttacaaccgcctcagttccaccgtcaaatcgcagctgcgcattttggttcaccgactaatggtggattcagttcaccgacgagtaatggacagtttggatcaccgactagtaatggatttggatcaccgacgactaatgggaagtttgatccttcgttcttggcggtgaggcaaacgcagcagcaaccaattcagagaatgtctacaccatcattgcatagtccagttagtaattacgttgaggatttggaatctgcaaacgctaatggagggagaactgtcttaactttattcccaactcgagacgattaaaaagtcattatctttccggttactagatgttcaaaatgtctctgcagtcatcaagaacatgagtcagctgatcgttcttgtgcatcggttttatccggtggcgtttactctgtgcagtcttatcagtttaacattgatacaatccagcgtcaatgtgtggtcaagttctgtatctgaagctcaagcaccttcaggtcaaggcttgtattaacccttgtagctttcttgtgtaagattaatgtaaagatgagtttacttttgaacgtacatccgtacgaacaaactcaagattggaaaaaagaatgaaaaaaacaaaaacttacttcac

SEQ ID NO: 121 - DNA, 3856 bp, Arabidopsis thaliana
  source 1..3856: mol_type = genomic DNA
cgccggggactttgatatcatctgcgccgaacaaaaactctgcagaaaccctaattttcgtcagtgattgattcttccgtttccaccatggaagaagtatgcgaaggaaaagaattctcattccctcgtcaagaagaagatgtcctctccttctggactgaaatcgatgctttcaagacacagctcaaacgcactgagaatcttcctgagtacatcttctacgacggacctccttttgccaccggacttcctcactacggacatatcctcgctggtacgattaaagatattgtgactcggtatcagaccatgactggtcaccatgtcactcgtcggtttgggtgggattgtcatggcttacctgttgagaatgagattgatcggaaattgaatattaagaggagagatgaagttattaagatgggaattgataagtataatgaagagtgtaggagtattgtgactcgttatgttgctgagtgggagaaggttattactaggtgtggtcgttggattgattttaagaatgattataagactatggatttgccttttatggaaagtgtttggtgggttttttctcagctttgggagaagaatcttgtttacagaggattcaaggttatgccgtacagtactggttgtaagacacctttatctaattttgaagctggtcagaactataaggaagtccctgatcctgaaatcatggtgacttttccggttattggggatcaagataatgctgcttttgtggcatggactactactccgtggactcttccaagcaatcttgctttgtgtgtaaatgcgaagtttgtctatgtgaaggttcgtaacaagaacactggaaaagtgtacattgttgctgaatctcggttgtctgctcttcccactgataagcctaaggccaagttaagtaatggacctgctggtgatactaagaaagcaaatcctaaagctaaaggtgctaaacctgagagtgcagctgattcttatgaagttttggagaaatttaatggagcttccctggttgggaagaagtatgaacctttgtttgattactttagtgatttctcaagtgaggcctttcgagtagtagcagatgattatgtcactgatgacagtggtactggtattgtccactgtgctcctgcctttggtgaagatgattatcgtgtttgtcttttgaacaaaataatcaaaaagggggagaatctagttgttgctgttgatgatgatgggttgtttactgagagaattacccacttcagtggccgttatgtcaaagatgcagacaaggatataattgaagccgttaaggccaagggcaggcttgttaaaacgggaagctttactcactcatacccattttgctggcgatcagacaccccactcatatatagagcagttccaagttggtttgtgcgtgtggagcagttgaaagaaaagttgttaaaaagcaatgaacagacagaatgggtacctggttatgtgaaggataaacgttttcacaattggctcgaaaatgcaagggattgggcaatcagccgaagtagattttggggcacgcctcttccgatatggataagtgatgatggggaggaagttgtgatcatggattccgtagagaagcttgaaaagctctctggtgttaaggtctttgacctgcatcgtcaccatattgatcatattacaattccatctagtcgtggcgatgagtttggtgtgctccgtcgtgtagaagatgtttttgattgttggtttgagagtgggtcaatgccttacgcgtatatccattatccgtttgaaaacaaggagttatttgagaagaactttcctggtgattttgtggctgaaggtcttgatcagactcgtggatggttttatactcttatggtgttgtctactgcattatttgaaaaaccagcgtttaaaaatctgatttgcaatggtcttgtacttgctgaggatgggaaaaagatggctaagaaattacggaattatccaccacctttggaagtcatagatgagtatggggctgatgctgtgcgattgtacctgataaattctccggttgtacgtgctgagccactacgcttcaaaaaagaaggagtactcggtgttgtcaaagatgtattccttccatggtacaatgcatatcggttcctcgttcagaatgcaaagagacttgagactgaaggtggtgtgccctttgttcctactgatctggcaactatacagtcagcaaacattcttgatcagtggattcactcagctacgcagagtcttgttcgttttgtccgcgaggagatggatgcctatcggctttacactgtggttcctcgtctcttgaagttcctcgacaatctcactaacatatatgtcagattcaaccgcaagagattaaaaggccgtacgggggaagatgattgtcacactgctctttcgactctattcaatgtgctccttacttcttgcaaagtgatggccccgtttacacctttcttcactgaaactttgtaccagaatctgcggaaagcgtgtaaaggttctgaggaaagtgttcactactgcagtattccaccaagggaaggaatggaaggggagaggattgagttaagtgttacgaggatgatgaaaatcattgatcttgctcggaacattcgtgagcgtaacaaactacccttgaaaactcctctaaaggaaatgattgtagtccatcccgatgctgatttcttaaatgacataactggagtactaagagagtatgtcttggaagaacttaacgtgagatcgcttgtaccatgcaatgatactctgaagtatgcatcactaaaagcagaaccagatttcagtgtattgggaaagcgacttggaaagtcgatggggcttgttgcaaaggaagttaaagaaatgtctcaaaaagatatcttagcatttgaggaggctggggaagttactattgctaaccacttgctaaaggaaacagatatcaagattgttagggttttcaaacgcccagacgatttgaaagagaatgagattgattcagctggagatggtgatgttttggtgattctggatctacgagcagatgattctttggttgaagcaggttttgcccgtgagattgtaaacaggatccagaaactaaggaaaaagtcaggtctggaaccaacagactttgtggaagtgtacttccaatcattggacgaggatgaatctgtttctaaacaagttctagtctctcaggaacaaaacatcaaggattcaattggctccactttacttttgtctagtttaatgccatcacatgcagtcataatagccgatgagacattcaccccaaaagaaacatccgatgagagtgtcaaaaaggttccaaagttgtcgtataagataagtttggctagaccggctttgaagttcaatgaagaggctgttcttgctttatactcaggagatgtgaaatctgcaaccgggcttcaaacatacttgttatcaagggatcattcgaatttgaagtcagagttccaagccggagatgggaagataactgtaagctgcattgaaaatgtgcctgttgcgactgtggttcttggcgaacatctccatttgagtgtcggcgatgacttattgagcaagaggaacgcatgagccgtccctccggttttgtttgatttattgtggtaacttgggatttatttcccttatttttcttcttccatatcttacctataaactacttatttagattgttgcaaaaagttaaatctcagtgttgagactctcttttactcgttctatttgtacaatactaaacttttattcatctcaaaatttatggttggac

SEQ ID NO: 122 - DNA, 2933 bp, Arabidopsis thaliana
  source 1..2933: mol_type = genomic DNA
atcttctttctatagtttccatgaagtcttcttcttctcagagctacgatgttttccccaacttcagaggggaagatgtccgccactcattagtcagccaccttcgtaaggaacttgatcgcaaattcatcaatacattcaacgacaacaggatcgaaagaagccgcaaaataaccccagagctgttattggctatagaaaactcaaggatctcacttgtcgtcttctctaaaaactatgcttcttccacgtggtgcttagatgaattggtgaagatccaagagtgctatgagaaattggatcaaatggtgattcctattttctacaaagtagatccttctcatgttagaaaacagaccggagagtttggcatggtctttggggagacctgcaagggcagaacagagaatgagaagcgaaaatggatgcgagctctagcagaggtagcacatctagccggagaagatcttcggaactgataagtttcaggtgggtaaacttccgataagtgattgtcggaacagtgtgtatgaggattaaacacagagaaagatcgtgtggtgattgtagtgtcggtaaacaagtttttaaagcctcccagctgtaatgtatcaaccgtcggaaaggggtgggtcccacgagcctgagtaaagacgcgtagcgaagcagaaatgcttgaaaatatcgccaaggatgtttcaaacaaactcttccccccatcaaataatttcagtgacttcgtcgggattgaagctcatatagaggcattgatatcaatgttgcgcttcgactccaagaaagcgcgaatgatagggatttgtgggccttctgaaactggtaagactactataggaagagctttatacagcagactcaaaagcgacttccaccatcgggctttcgtagcatataagagaaaaatacggagcgactatgaccagaagctgtattgggaagaacaatttctatcagaaattctttgtcagaaggatataaagatagaggaatgtggtgcggtggaacaacgactaaagcacacgaaagttcttattgttcttgatgatgttgatgatatagagctactaaaaacgttggtaggacgtatcagatggtttggatctgagagcaaaattgttgtgattactcaaaaaagggaacttctcaaggctcacaacattgcacatgtttatgaagtgggattcccatcagaagaactggctcatcaaatgttttgtcgatatgcttttgggaaaaactctccacctcatggtttcaacgagcttgcagatgaagctgcaaagattgccggtaatcgtcctaaagctctcaagtacgttggttcgtcttttagaagactagacaaggaacaatgggtgaagatgctatcggagttccgtagtaatgggaataaactaaaaatcagctatgatgagttagatggtaaaggtcaagattacgttgcgtgtttaaccaatggttcaaattcccaggtgaaggcagagtggatccacttggcactaggcgtgtctatattacttaacatccgcagtgacggaacgacaattctcaaacatttgagctacaatcgaagcatggcgcaacaagcaaaaatatggtggtatgaaaatttggaaagagtgtgcaagaagtacaatatatgtggcatagatagctcaactgatggtggtggttcaacgtatggacaatgttcaaattcccaatttcaaagaaacatggacgcaagccccgggggaaacaaaaccagtaatcaatccacaaaagattcaccgagagcttctcaagtagagaaggaaaagatcgagtactgtgagccacatgtatatataacacctgccatcttcagtgacggaaccagagctcccaaatacgtggagtctagtagccgaagagtaacccaagtgcaccacgccaaaacatggtggccggagaattgtgaaaaagtgtacgagaaccacaacaacatatatggcatagatagatcaattgacggtggtgataagtttgagggaaaaagtaaagttagtgacggtgggttagacggcaaagatcaaggttcaatgtatggacaaagttcaaattccgagcttcaaataaacatggacgcagacaataggagatgtgaacctgtgagtgagatgcttttcaaaaattacaatgtgtgttcgcctaatgcacatatgcctgcaggtttaaccgatgtaaactgttcaaatccccagtctcaaagaaaattggacgcaagcctaaagaaagacaaaattgtgcatgagtggattcgaaccggtagtggcttcttttttgattttcagggcccaaaatctatagtgagtgctgctcaagtggacgagaaaaatttcgagtactgtgaacaaggtgtgtatataacacttggcatcctcagtggcggaattatagttctcaaacatttggagttcagccgaagaatggcgcaacaagcaaaagtttggtggtcggaaaattggataaaagtgtaccaggagcacaacatatgtggcatagataaatcatttgatggtaggtttgatgatagacgtgtcattcgtcaattaagaccaaactgaagcacggcctggcccttgtaaaagtcaggacttgagctagatacttaagccaagcagatctgtttggctaagtctggtcgggttagcgcgaaattgtcgaaatctgtttaataattgcattcagtgcaagtctttaatttgtacttcatggctttaatacactaattaaacattggatcatttttagttttttcttcttttcaaaatacatatttttctaagttttccaatttagtgattttattagttctttagtagaatactggatcatggacacatgctacaacatgctttgacctaattatgaaatttatcagcgaatatattatg

SEQ ID NO: 123 - DNA, 960 bp, Arabidopsis thaliana
  source 1..960: mol_type = genomic DNA
tcgtcgccgttaaaatctgcgatctcattgctcattggtgaagacaaatccctaattcgtatgtcagattctgtggccggcgatttccctcccgatccacttctcgcctccggagccttcatctcctccgccggtgacggaaccctagacagtagtgcgaaacgacgaccgattcagggaggaatcggaatttctggttcgggagagagcgtacgcatcgggatggctaacggcactgatcaggtgaatcatcagacggaatcgaagtcgcggaagcgtgcggcgcctggagataattggttgcctcctggttggagagttgaagataagattcgaacttccggtgccacagctggttcggtggataagtactattacgaaccaaatacaggacgtaagtttcggtccaggactgaggtgctgtactacttggaacatggaacttctaaaagaggcaccaagaaagctgagaatacatatttcaatccagaccattttgaaggccaaggaagcaatagagtcaccagaaccgctacagtgcctccacctccgccaccgccattggactttgattttaagaatccaccagacaaggtaagctggtctatggcaaacgcaggagaagaaggttggatacctaatattggggacgtcaaggttcaagactcagtgagacgagattggagcactgcgtttacctttatcacaagccgaaaccctagtaaagtgtcggcttgaagactatgatgacctggtggcgatttttgggttgttgcatctatggtaagatacacagatatgttagggttacttaattggataattcttgtttagtcttcattcatcaatcatcaagttatgtgtactataatttttgtagcggtttttggaagaatatgataaggggatatgcatctttgtgtttgcttttggaacgtgataaccattcgacttttgact

SEQ ID NO: 124 - DNA, 464 bp, Cardiovirus A
  source 1..464: mol_type = other DNA
gagggcccggaaacctggccctgtcttcttgacgagcattcctaggggtctttcccctctcgccaaaggaatgcaaggtctgttgaatgtcgtgaaggaagcagttcctctggaagcttcttgaagacaaacaacgtctgtagcgaccctttgcaggcagcggaaccccccacctggcgacaggtgcctctgcggccaaaagccacgtgtataagatacacctgcaaaggcggcacaaccccagtgccacgttgtgagttggatagttgtggaaagagtcaaatggctctcctcaagcgtattcaacaaggggctgaaggatgcccagaaggtaccccattgtatgggatctgatctggggcctcggtgcacatgctttacatgtgtttagtcgaggttaaaaaaacgtctaggccccccgaaccacggggacgtggttttcctttgaaaaacacgatgataat

SEQ ID NO: 125 - DNA, 228 bp, Tobacco mosaic virus
  source 1..228: mol_type = other DNA
atctaagttaggttgtaaacatattagagacgttgttcatttggaagagttacgcgagtctttgtgtgatgtagctagtaacctaaataattgtgcgtatttttcacagttagatgaggccgttgccgaggttcataagaccgcggtaggcggttcgtttgctttttgtagtataattaaatatttgtcagataagagattgtttagagatttgttctttgtttgata

SEQ ID NO: 126 - DNA, 101 bp, Hibiscus chlorotic ringspot virus
  source 1..101: mol_type = other DNA
tagcttgtttgggttctttatcactgtcctgattaaggctgaatcagaacactttcacttccacacacacgacagtagtaagacacaaaatatagtagtta

SEQ ID NO: 127 - DNA, 147 bp, Zea mays
  source 1..147: mol_type = other DNA
agcacaacatttcaaccagaaacactagccgaagcaaatccattccacaagcacctggtgggatcatctcatcatcagaaaccaagagagagattccgtgtccgcttgttgtagtagattgtgaggactgaggaccgagaagcagcc

SEQ ID NO: 128 - DNA, 196 bp, Plautia stali intestine virus
  source 1..196: mol_type = other DNA
aagctgactatgtgatcttattaaaattaggttaaatttcgaggttaaaaatagttttaatattgctatagtcttagaggtcttgtatatttatacttaccacacaagatggaccggagcagccctccaatatctagtgtaccctcgtgctcgctcaaacattaagtggtgttgtgcgaaaagaatctcacttcaa

SEQ ID NO: 129 - DNA, 174 bp, Kashmir bee virus
  source 1..174: mol_type = other DNA
aatttaaatatgttaataatgctgaagacaagtatttcgattattaacctctatatttctatataaagtatctgtgagtctcagtggacatcacagtaaggtcgcagttaacttgtaatcttttcattcctgtgtcggagcagtggtaatggagccggacgatttcgccaaaac

SEQ ID NO: 130 - DNA, 204 bp, Solenopsis invicta virus 1
  source 1..204: mol_type = other DNA
aacgtttctcttctggttaccagcaacataggaaattgtcgttgaactacatgttgtaaggctttagagaaataagggagtgtcctatttaggatgaggtgctccggtggcagccccaccaaaacctctagcgactaggaacagctatatcgggttgctatagcagtcaggatgtcattctggcgttccgaaatacccaaacct

SEQ ID NO: 131 - DNA, 178 bp, Triatoma virus
  source 1..178: mol_type = other DNA
tgatcttgctttcgtaataaaattctgtacataaaagtcgaaagtattgctatagttaaggttgcgcttgcctatttaggcatacttctcaggatggcgcgttgcagtccaacaagatccagggactgtacagaattttcctatacctcgagtcgggtttggaatctaaggttgactc

SEQ ID NO: 132 - DNA, 211 bp, Cricket paralysis virus
  source 1..211: mol_type = other DNA
taaaaagcaaaaatgtgatcttgcttgtaaatacaattttgagaggttaataaattacaagtagtgctatttttgtatttaggttagctatttagctttacgttccaggatgcctagtggcagccccacaatatccaggaagccctctctgcggtttttcagattaggtagtcgaaaaacctaagaaatttacctgctacatttcaagata

SEQ ID NO: 133 - DNA, 353 bp, Cricket paralysis virus
  source 1..353: mol_type = other DNA
ttcgataccaagagctggtgtctgagggattacgactcgcgtggtcggacagcacatgttagtcatgtattatggtgtttcccaacacgtatctttgctctagtattgaactttagtgatgagtgtacttggcatgtacacctgattagttagcccttgtggatacgccactgccgctcaggtacagtaggacataccccaaatattgggttccactcgtagagaagaaaattagtggcgaaacgtacggtttatgtcaaaggagaaggtgattttaattgcacctgaagcaaccctaggtcttccctttgatgtgagctaataaggagtaaccgattcttacaatgtgatca

SEQ ID NO: 134 - DNA, 232 bp, Hepacivirus C
  source 1..232: mol_type = other DNA
gcctccaggaccccccctcccgggagagccatagtggtctgcggaaccggtgagtacaccggaattgccaggacgaccgggtcctttcttggataaacccgctcaatgcctggagatttgggcgtgcccccgcaagactgctagccgagtagtgttgggtcgcgaaaggccttgtggtactgcctgatagggtgcttgcgagtgccccgggaggtctcgtagaccgtgcacc

SEQ ID NO: 135 - DNA, 116 bp, Turnip crinkle virus
  source 1..116: mol_type = other DNA
ctctctctcactggtcctcctactttgtcatctgattcctgaaatcaaaccgattcacacatcctacaacacacacgactcatcgaagcagcaacacataagcatcaacactggaa

SEQ ID NO: 136 - DNA, 148 bp, Turnip vein-clearing virus
  source 1..148: mol_type = other DNA
gaattcgtcgattcggttgcagcatttaaagcggttgacaactttaaaagaaggaaaaagaaggttgaagaaaagggtgtagtaagtaagtataagtacagaccggagaagtacgccggtcctgattcgtttaatttgaaagaagaaa

SEQ ID NO: 137 - DNA, 579 bp, Rhopalosiphum padi virus
  source 1..579: mol_type = other DNA
gataaaagaacctataatcccttcgcacaccgcgtcacaccgcgctatatgctgctcattaggaattacggctccttttttgtggatacaatctcttgtatacgatatacttattgttaatttcattgacctttacgcaatcctgcgtaaatgctggtatagggtgtacttcggatttccgagcctatattggttttgaaaggacctttaagtccctactatactacattgtactagcgtaggccacgtaggcccgtaagatattataactattttattatattttattcaccccccacattaatcccagttaaagctttataactataagtaagccgtgccgaaacgttaatcggtcgctagttgcgtaacaactgttagtttaattttccaaaatttatttttcacaatttttagttaagattttagcttgccttaagcagtctttatatcttctgtatattattttaaagtttataggagcaaagttcgctttactcgcaatagctattttatttattttaggaatattatcacctcgtaattatttaattataacattagctttatctatttata

SEQ ID NO: 138 - DNA, 367 bp, Homo sapiens
  source 1..367: mol_type = other DNA
aattccagcgagaggcagagggagcgagcgggcggccggctagggtggaagagccgggcgagcagagctgcgctgcgggcgtcctgggaagggagatccggagcgaatagggggcttcgcctctggcccagccctcccgctgatcccccagccagcggtccgcaacccttgccgcatccacgaaactttgcccatagcagcgggcgggcactttgcactggaacttacaacacccgagcaaggacgcgactctcccgacgcggggaggctattctgcccatttggggacacttccccgccgctgccaggacccgcttctctgaaaggctctccttgcagctgcttagacgctggatttttttcgggt

SEQ ID NO: 139 - DNA, 222 bp, Israeli acute paralysis virus
  source 1..222: mol_type = other DNA
gtatagtgttctggaggcatcattctatggttacccatcattagaggaaatttccaataaactctggtgtaaggcttagagtgatggtcgaggtgccctatttagggtgaggagcctcggtggcagccccaccaaatcctctattggataggaacagctgtactgggcagttacagcagtcgtatggtaacacatgcggcgttccgaaataccatgcctggc

SEQ ID NO: 140 - DNA, 174 bp, Drosophila C virus
  source 1..174: mol_type = other DNA
aatgattttgaaacatattaagatgtttatacgagcgtgttgtttactattttcaggatatgtggaagcggttgtgtatgatctatacgcacatttagttcccagagggcgttgtcgtctccccctaagcaagggagaaacacgtggcacatgatcttgcgcttaacgataaaa

SEQ ID NO: 141 - DNA, 190 bp, Black queen cell virus
  source 1..190: mol_type = other DNA
ccaacaatgtgatcttgcttgcggaggcaaaatttgcacagtataaaatctgcaagtagtgctattgttggaatcaccgtacctatttaggtttacgctccaagatcggtggatagcagccctatcaatatctaggagaactgtgctatgtttagaagattaggtagtctctaaacagaacaatttacct

SEQ ID NO: 142 - DNA, 174 bp, Homalodisca coagulata virus 1
  source 1..174: mol_type = other DNA
ttgcctctctcaacaaaaagccaccgacattaagagagagagtattgctgcttagttaactgcaggccctatttagggttaccgcccaggatctgcaacagcattcctgtatcatccagggcaccggtggacttggtgaggattgagttgacctcatcattagagaccagactc

SEQ ID NO: 143 - DNA, 184 bp, Aphid lethal paralysis virus
  source 1..184: mol_type = other DNA
aattactaatttgatctttaggttataatgttaggactataaaaattagcttaatgcatttagtaatttaaggcttagttatttaactttacttatcaagatggccgttggcagccccacgaaatctagattagtccgaatgtcctattttgattaggtggtcagataggtcagaaactcacct

SEQ ID NO: 144 - DNA, 174 bp, Himetobi P virus
  source 1..174: mol_type = other DNA
catccgtaatacaacccggaataacctccaaaccgagaagaactagtctatgaccagacgaaaaggaactagtccctgttcttttcttagggcctttttcacctgggtaaagtgtagttattgcgtataactctggtatcaataccacccggaagaaattatttatctgccatc

SEQ ID NO: 145 - DNA, 174 bp, Mud crab virus
  source 1..174: mol_type = other DNA
catttatttatattaaatactgacactttgcgggttaaaatgtttaatactatttttcaatttgaggttgtatgagataattttgatttctatgttatcattgaataagggagtctggccctaattgatgtacgactcttctttggttgcgacccgagtcccttctacatcaag

SEQ ID NO: 146 - DNA, 642 bp, Cadicivirus A
  source 1..642: mol_type = other DNA
aactctaagccgaacaattatagctaggctttttattatataacattaattaggcattagcgttgtcgccaatctcttggtaatcctaaggatacctttcctgttgactaagatgaagcgccttcggttaccgatgcccggtgtccacgaagccatcgtggtcggccgcgtcccccacctctcccaacttggactccatgttttcagtaggtgtaatgattagtattattgattctgctcgttcaatgtgtttatcttcacgatctgggacccaacacatgcttcactcatgtttaaatgttggttccctcattttgaagacacccaaaccatagagtgcgagaatgaggatttctacttccattctggtaacagaaatgaattcctgcgtgtgtctcgtaaatggaatctttaagaacttcagataaatcgaacaatacactaatacaagttgttttctaccaacatgttcaatgcggctaatctgaccgtggagctgtgaagcgctcaaacccgagtgttgtatacagtcgtaatgcgtaagtccatgaggaaccgactactgttacctctgttggtgtgtttctcctttattctcttttattattatttgttattgcaaatactacaactttgatcaac

SEQ ID NO: 147 - DNA, 130 bp, Arabidopsis thaliana
  source 1..130: mol_type = genomic DNA
gtaaggatttttatgatatagtatgcttatgtattttgtactgaaagcatatcctgcttcattgggatattactgaaagcatttaactacatgtaaactcacttgatgatcaataaacttgattttgcag

SEQ ID NO: 148 - DNA, 91 bp, Arabidopsis thaliana
  source 1..91: mol_type = genomic DNA
gtaacattccttagttacctttcttttctttttccatcataagtttatagattgtacatgctttgagatttttctttgcaaacaatctcag

SEQ ID NO: 149 - DNA, 108 bp, Arabidopsis thaliana
  source 1..108: mol_type = genomic DNA
gtgctcttgaaattggaactcttcttttgttgtctaaacctatcaatttctttgcggaaatttatttgaagctgtagagttaaaattgagtcttttaaacttttgtag

SEQ ID NO: 150 - DNA, 101 bp, Arabidopsis thaliana
  source 1..101: mol_type = genomic DNA
gtaagttgttacttatgattgttttcctctctgctacatgtattttgttgttcatttctgtaagatataagaattgagttttcctctgatgatattattag

SEQ ID NO: 151 - DNA, 121 bp, Arabidopsis thaliana
  source 1..121: mol_type = genomic DNA
gttagtatcatatgaagaaatacctagtttcagttgatgaatgctattttctgacctcagttgttctcttttgagaattatttcttttctaatttgcctgatttttctattaattcattag

SEQ ID NO: 152 - protein, 124 aa, Arabidopsis thaliana
GTAAATCCTGGTCCACACTTTTACGATAAAAACACAAGATTTTAAACTATGAACTGATCAATAATCATTCCTAAAAGACCACACTTTTGTTTTGTTTCTAAAGTAATTTTTACTGTTATAACAG

SEQ ID NO: 153 - protein, 136 aa, Arabidopsis thaliana
GTAAGAGGTCAAAAGGTTTCCGCAATGATCCCTCTTTTTTTGTTTCTCTAGTTTCAAGAATTTGGGTATATGACTAACTTCTGAGTGTTCCTTGATGCATATTTGTGATGAGACAAATGTTTGTTCTATGTTTTAG

SEQ ID NO: 154 - DNA, 150 bp, Arabidopsis thaliana
  source 1..150: mol_type = genomic DNA
gtaagttctgcatttggttatgctccttgcattttaggtgttcgtcgcacttccatttccatgaatagctaagattttttttctctgcattcattcttcttgcctcagttctaactgtttgtggtatttttgttttaattattgctacag

SEQ ID NO: 155 - DNA, 121 bp, Arabidopsis thaliana
  source 1..121: mol_type = genomic DNA
gtaaagcaactgtgttttaatcaatttcttgtcaggatatatggattataacttaatttttgagaaatctgtagtatttggcgtgaaatgagtttgctttttggtttctcccgtgttatag

SEQ ID NO: 156 - DNA, 136 bp, Arabidopsis thaliana
  source 1..136: mol_type = genomic DNA
gtaaagtttccaactttcctttaccatatcaaactaaagttcgaaactttttatttgatcaacttcaaggccacccgatctttctattcctgattaatttgtgatgaatccatattgacttttgatggttacgcag

SEQ ID NO: 157 - DNA, 121 bp, Arabidopsis thaliana
  source 1..121: mol_type = genomic DNA
gtctgtctttcctatttcatatgtttaatcctaggaatttgatcaattgattgtatgtatgtcgatcccaagactttcttgttcacttatatcttaactctctctttgctgtttcttgcag

SEQ ID NO: 158 - DNA, 159 bp, Arabidopsis thaliana
  source 1..159: mol_type = genomic DNA
gtaaaatattggatgccagacgatattctttcttttgatttgtaactttttcctgtcaaggtcgataaattttattttttttggtaaaaggtcgataatttttttttggagccattatgtaattttcctaattaactgaaccaaaattatacaaaccag

SEQ ID NO: 159 - DNA, 109 bp, Arabidopsis thaliana
  source 1..109: mol_type = genomic DNA
gtaaggacttctcatgaatattagtggcagattagtgttgttaaagtctttggttagataatcgatgcctcctaattgtccatgttttactggttttctacaattaaag

SEQ ID NO: 160 - DNA, 189 bp, Solanum tuberosum
  source 1..189: mol_type = genomic DNA
gtttgtttctgcttctacctttgatatatatataataattatcattaagtagtagtaatataatatttcaaatatttttttcaaaataaaagaatgtagtatatagcaattgcttttctgtagtttataagtgtgtatattttaatttataacttttctaatatatgaccaaaacatggtgatgtttag

SEQ ID NO: 161 - DNA, 94 bp, Cucumber mosaic virus
  source 1..94: mol_type = other DNA
gtttatttacaagagcgtacggttcaatccctgcctcccctgtaaaactaccctttgaaaacctctctttcttaatcttttctttgtaattcct

SEQ ID NO: 162 - DNA, 74 bp, Brome mosaic virus
  source 1..74: mol_type = other DNA
gtagaccacggaacgaggttcaatcccttgtcgaccacggttctgctacttgttctttgtttttcaccaacaaa

SEQ ID NO: 163 - DNA, 107 bp, Citrus tristeza virus
  source 1..107: mol_type = other DNA
aatttcacaaattcaacctgttcgcccagaaaatacgtctggcacaacagggatccggaataggtccagcctttaagctctaatattcccacaacaaaaattacact

SEQ ID NO: 164 - DNA, 107 bp, Beet yellows virus
  source 1..107: mol_type = other DNA
gtttttaaccatccttctactagacgtacactcgtacatcctctagtatttcctttatttatcttcccataagcccctgcctttaacgtttaactctcgctatcgac

SEQ ID NO: 165 - DNA, 206 bp, Cowpea mosaic virus
  source 1..206: mol_type = other DNA
tattaaaatcaatacaggttttgataaaagcgaacgtggagaaatccaaacctttctttctttcctcaatctcttcaattgcgaacgaaatccaagctttggttttgctgaaacaaatacacaacgtatactgaatttggcaaatttctctctctctctctgtcattttctttcttctgtcgggactttcttagtcttgacccaac

SEQ ID NO: 166 - DNA, 84 bp, Potato virus X
  source 1..84: mol_type = other DNA
gaaaactaaaccatacaccaccaacacaaccaaacccaccacgcccaattgttacacacccgcttggaaaagcaagtctaacaa

SEQ ID NO: 167 - DNA, 161 bp, Potato virus A
  source 1..161: mol_type = other DNA
aaaataaacaaactacaaaacacaatcaagaaatcaaacgaattagagcaatcaatcttctaaatcttcaagcagttcacaacattttaaacacaatcaaaacttgaacaagttcaatcaaacacccaaattcagtttaaatactcaaaacgcaagcatca

SEQ ID NO: 168 - DNA, 184 bp, Potato virus Y
  source 1..184: mol_type = other DNA
aattaaaacaactcaatacaacataagaaaaacaacgcaaaaacactcataaacgctcattctcactcaagcaacttgctaagtttcagtttaaatcatttccttgcaattctctagaacaatattggaaaccatttcaactcaacaagcaatttcatcacttccaaccaatttcagatcctca

SEQ ID NO: 169 - DNA, 167 bp, Pepper mottle virus
  source 1..167: mol_type = other DNA
aaattaaaacataacatacaacataaacgaaagcaatcaaattttcaagcatttttcttgagctctttgatttttcctgcataaattaagcactttgatcaacaacatagtctcgatttgaatatttcaattgtttccagttttctctaatagcactccatactaaa

SEQ ID NO: 170 - DNA, 190 bp, Bean yellow mosaic virus
  source 1..190: mol_type = other DNA
aaaaaatataaaaactaaacaagacaatacaagacataacgcattcagaccttcaaacattcgcaagctttaaacaactttgtgtgaatttcgagtataagatttctaaaattctaaaattaaagtaattagtctttctttaagtgtcaatcaaatttgagtttttcgttattactattgcaagcttata

SEQ ID NO: 171 - DNA, 91 bp, Barley stripe mosaic virus
  source 1..91: mol_type = other DNA
gtatgtaagttgcctttgggtgtaaaatttcttgcatgcacataatcgtaatcgattcttcttgatctctaaacaacactttcccgttagc

SEQ ID NO: 172 - DNA, 115 bp, Wheat stripe mosaic virus
  source 1..115: mol_type = other DNA
cgaaagttaacactgagtacacacgatcccttgataccagcagcatctgtgagcttgtttggttaggcaacgcgggtcgaggtttactctgattgtacactggaaattatcagca

SEQ ID NO: 173 - DNA, 79 bp, Rice yellow mottle virus
  source 1..79: mol_type = other DNA
acaattgaagctaggaaaggagcatattgcgaaagcatccctccttccgacgaacaattgtagccacactgcatcgtgt

SEQ ID NO: 174 - DNA, 139 bp, Maize dwarf mosaic virus
  source 1..139: mol_type = other DNA
aaaaacaacaagactcaacacaacacaaccaaacacgaccaaacacaaccaaattacacgttattggagcacattcagtttgcaggcaacggttcgtttgcaaggtgcatcgaaaagcctctctgaacacacgatcgca

SEQ ID NO: 175 - DNA, 138 bp, Zucchini yellow mosaic virus
  source 1..138: mol_type = other DNA
aaattaaaacaaatcacaaagactacagaaatcaacgaacaagcagacgatttctaaaccgtgtttacaaacaagcaatctataattcgcacagcatcaagaatttctgcaatcactttgtttattttagacacaaca

SEQ ID NO: 176 - DNA, 132 bp, Watermelon mosaic virus
  source 1..132: mol_type = other DNA
aaattaaaactactcataaagacatcaaacaaaacaaacgcaaacaaattctcaagttttcaagctatttcaagcaatttgcattttcgatatttataagtttacgattcatcaatatcaacaacaacacga

SEQ ID NO: 177 - DNA, 148 bp, Sugarcane mosaic virus
  source 1..148: mol_type = other DNA
aaaacaacaaaactcaatacaacacaacaaaacacatccaagcaaaccaacgacatttgcaatcaaacttcagcgcacggctcaaaagagaaggctctttgagaacgctctctgaacttccctccttcggcattcgacttccggcgag

SEQ ID NO: 178 - DNA, 68 bp, Tobacco mosaic virus
  source 1..68: mol_type = other DNA
gtatttttacaacaattaccaacaacaacaaacaacaaacaacattacaattactatttacaattaca

SEQ ID NO: 179 - DNA, 71 bp, Tomato mosaic virus
  source 1..71: mol_type = other DNA
gtatttttacaacaattaccaacaacaacaacaaacaacaacaacattacattttacattctacaactaca

SEQ ID NO: 180 - DNA, 67 bp, Turnip vein-clearing virus
  source 1..67: mol_type = other DNA
gtttagttttattgcaacaacaacaacaaattacaataacaacaaacaaaatacaaacaacaacaac

SEQ ID NO: 181 - DNA, 69 bp, Pepper mild mottle virus
  source 1..69: mol_type = other DNA
gtaaatttttcacaatttaacaacaacaacacaaacaacaaacaacattacaaacaaaatacaactaca

SEQ ID NO: 182 - DNA, 63 bp, Turnip crinkle virus
  source 1..63: mol_type = other DNA
ggtaatctgcaaatccctggcacccgcctaaaattgccctcatcaaccttctctctattcacg

SEQ ID NO: 183 - DNA, 165 bp, Tomato bushy stunt virus
  source 1..165: mol_type = other DNA
naaattctccaggatttctcgacctagttcgtttatctggtgacttgcgctaccgttgctttgcgtagagaatttctctccataattattatctttagttgtggggtttgaaggttgggtctacctttcggggggataaattgtaacttccaacaaacaagcgac

SEQ ID NO: 184 - DNA, 33 bp, Tomato spotted wilt orthotospovirus
  source 1..33: mol_type = other DNA
agagcaatcaggtaacaacgattttaagcaaac

SEQ ID NO: 185 - DNA, 32 bp, Watermelon bud necrosis orthotospovirus
  source 1..32: mol_type = other DNA
agagcaatcgtgcaacaataagaatatcagta

SEQ ID NO: 186 - DNA, 87 bp, Turnip yellow mosaic virus
  source 1..87: mol_type = other DNA
gtaatcaactaccaattccagctctcttttgacaactggtcttatacccacttccgtacacttgcaaccctcgtaagacaattgcaa

SEQ ID NO: 187 - DNA, 281 bp, Cucumber mosaic virus
  source 1..281: mol_type = other DNA
cggtctccctcttcgggcgggatctgagttggcggtaatctgcaaaccgtctgaagtcactaaacacattgtgtggtgaacgggttgtccatccagctaacggctaaaatggtcagtcgtggagaaatccacgccagtagacttacaagtctctgaggcacctttgaaaccatctcctaggtttcttcggaaggacttcggtccgtgtacttctagcacaacgtgctagtttcagggtacgggtgccccccactttcgtgggggtctctaaaaggagacca

SEQ ID NO: 188 - DNA, 274 bp, Brome mosaic virus
  source 1..274: mol_type = other DNA
tgcgcttgtctctgtgtgagacctctgctcgaggagagccctgttccaggtaggaacgttgtggtctaactcaagactagctgaatcggtgctataaccgatagtcgtggttgacacgcagacctcttacaagagtgtctaggcgcctttgagagttactctttgctctcttcggaagaacccttaggggttcgtgcatgggcttgcatagcaagtcttagaatgcgggtgtcgtacagtgttgaaaaacactgtaaatctctaaaagagacca

SEQ ID NO: 189 - DNA, 273 bp, Citrus tristeza virus
  source 1..273: mol_type = other DNA
ttgaagtggacggaataagttcctcgcggaactttgtgttgggttggtaaagacccttatgatggtgatatatcactagacaataaccggatgggtaaagtctttaaaatgatcgaggggaaaattaaccgtatcctctcgttggtctaagctcccacagagtggtagtggtctcaagtgaggcttaacgtatgcgtgaaccaaagaagttctccttagagtgtgtgttgtttacccaacgcactgtccctatggggggccaacataggtcca

SEQ ID NO: 190 - DNA, 182 bp, Beet yellows virus
  source 1..182: mol_type = other DNA
tagagaagtgacggaggcgacctacctaccgtgtaatttaagtcgtcacagagtgacaacggcaccaagtggtgcttagtgcgtatgtaaattacgaagtgcaaaaaatttttctttttatattaagaaaatttttgcacactcctagcgaagtcccgctaggaagaaaaaataaggggccc

SEQ ID NO: 191 - DNA, 72 bp, Potato virus X
  source 1..72: mol_type = other DNA
ctacgtctacataaccgacgcctaccccagtttcatagtattttctggtttgattgtatgaataatataaat

SEQ ID NO: 192 - DNA, 227 bp, Potato virus A
  source 1..227: mol_type = other DNA
taaccgaagtgccgtactattactaagtaagagttcctgttagtatccttgtcttattattagaatacgtttatctttcaacaagtatgatgttcgtgctctcacctcgcaacagtgagtttgagtgggaaataaatactagtattctatggccttacttgttatatagacccaccacatagtgagattttatctcggtgactggttttatgtttcaactgtcaggg

SEQ ID NO: 193 - DNA, 328 bp, Potato virus Y
  source 1..328: mol_type = other DNA
tgtagtgtctctccggacgatatataagtatttacatatgcagtaagtattttggcttttcctgtactacttttatcataattaataatcgtttgaatattactggcagataggggtggtatagcgattccgtcgttgttagtgaccttagctgtcggttctgtattattaagtcttagataaaaagtgccgggttgttgttgtgtgactgatctatcgattaggtgatgctgtgattctgtcatagcagtgactatgtctggatttagttacttgggtgatgctgtgattctgtcatagcagtgactgtaaacttcaatcaggagac

SEQ ID NO: 194 - DNA, 266 bp, Pepper mottle virus
  source 1..266: mol_type = other DNA
ctgatgtggtctctgggatgaaatattattatatgtagtatgcaatatatagtatggcttttctcgttccagtctttatattaatgagagtaacttaagtaagtaatttgtacttcaaggattaatcaaggtgactctctgacactctcagtgaggtgacttgtttagtctgagtttacttattgtgagtataaagaatctctcagaaaacgagagtgacttctagacacactctaggaggtgatcgtagttggcatgagagagac

SEQ ID NO: 195 - DNA, 171 bp, Bean yellow mosaic virus
  source 1..171: mol_type = other DNA
agtatccgtctttaaattctctataatttggcgttacattacttaatactatgtattagtgaggtttcacctccagcattttaaattcagtatgtgtatcattctctctactctgacagggtaagcagttagtgaggttgcctcgtgtgagcctgatctttgtagagcgag

SEQ ID NO: 196 - DNA, 257 bp, Barley stripe mosaic virus
  source 1..257: mol_type = other DNA
aaaaaaaaaaaaaaaaaaatgtttgatcagatcattcaaatctgatggtgcccatcaaccatatgatgggagtgtttgcaagtccactataatcgaacttgaaaacgatgcctgaattggaaaccatgaatcttaacggattctggagagaaaatttaggaattggtatgtaagctacaacttccggtagctgcgtcacactttaagagtgtgcatactgagccgaagctcagcttcggtcccccaagggaagacca

SEQ ID NO: 197 - DNA, 350 bp, Wheat stripe mosaic virus
  source 1..350: mol_type = other DNA
gcgttgtcactcgtccgaagacgttaaactacggtgtcgttcattcgacgtgagattctgagttatgggtattgctacaaacccacacgaggtggtcgtccgtgcctgacattaagttgttgggatagaccagggcaagtcgggactttggctagaagtttgtgggtaacttcactgttaaaccctctggttcaacgtcagaaccacctaggagataatactctgggtttagttggcgtctgttgtaattatttataattcagcattttaaaatttcaagaaggtctttgaccatatagttgtactgggtgtgagttgtaccagtgtgttgttaactatgtttgtgtata

SEQ ID NO: 198 - DNA, 246 bp, Rice yellow mottle virus
  source 1..246: mol_type = other DNA
atccacggattggctacgagatcgacttaccctgaaaaggatgttgagcgttcttgaacgcggcccaatcctacgagatgatactggtgactatcctacgtgaggagttgcactcacgcttcaacccaaagcgacccatgcactggacagtgcttacccagatggttttcggagctactgggcggacctttcaccaaaccgaattccccactctttccgagagaattctcgggatgggtgggggag

SEQ ID NO: 199 - DNA, 250 bp, Maize dwarf mosaic virus
  source 1..250: mol_type = other DNA
tacggggttcaacttttacgcagtaatttagtaatatataagtaagctattgtggtgaggttgtacctcgttagttttatatatatattatgctacgtacctactatgtctgcaagtgagtgaggttgcacctcgacacttatagtgggcactattactagcttcgaatcacgagacggacggtccattgagtggttctaccacgaggatgcagcgagtttcgtggtgagagacaaaaaaaaaaaaaaaa

SEQ ID NO: 200 - DNA, 213 bp, Zucchini yellow mosaic virus
  source 1..213: mol_type = other DNA
taaagggtaggtcacctacctaggttatcgattcgctgccgacgtaattctaatatttaccgctttttatgatatctttagatttcagtgtgggcctcccacctttaaagcgtaaagtttatgttagttgtccaggaatgccgtagtcctgtcggaagctttagtgtgagcctctcacggataagctcgagattagactccgtttgcaagcct

SEQ ID NO: 201 - DNA, 249 bp, Watermelon mosaic virus
  source 1..249: mol_type = other DNA
agactaggtaaactggtcacagttagcatttcgggtcgttataagttttctataatataatatgttgcactttttagtatagtgtgattttatcacctttgtactgtttatgttagtgtggtttaaccatcttagtgtgctttatattatagtttatgcataacagggagaaccattacaataccggagttgtttgtagtgtgattacatcacggttaatagccgaggtacggtaatgtttgttgtcct

SEQ ID NO: 202 - DNA, 235 bp, Sugarcane mosaic virus
  source 1..235: mol_type = other DNA
tctcctggaaaccctgtttgcagtatctatagtatgttatgtgtactagtattaaaagtgaggctttgtctcgtttctgcttttactatttacgtactataagtgtgaaccagtctgcaagatacagggttggacccagtgtcttctggtgtagcacatactagcgtcgagccatgtcacggacagcgctgaggatggctttgccatgtgtgctgcgagtctcatggtgagagac

SEQ ID NO: 203 - DNA, 204 bp, Tobacco mosaic virus
  source 1..204: mol_type = other DNA
ggtagtcaagatgcataataaataacggattgtgtccgtaatcacacgtggtgcgtacgataacgcatagtgtttttccctccacttaaatcgaagggttgtgtcttggatcgcgcgggtcaaatgtatatggttcatatacatccgcaggcacgtaataaagcgaggggttcgaatccccccgttacccccggtaggggccca

SEQ ID NO: 204 - DNA, 201 bp, Tomato mosaic virus
  source 1..201: mol_type = other DNA
atgcataggtgctgaaatataaattttgtgtttctaaaacacacgtggtacgtacgataacgtacagtgtttttccctccacttaaatcgaagggtagtgtcttggagcgcgcggagtaaacatatatggttcatatatgtccgtaggcacgtaaaaaagcgagggattcgaattcccccggaacccccggttggggccca

SEQ ID NO: 205 - DNA, 235 bp, Turnip vein-clearing virus
  source 1..235: mol_type = other DNA
gcgtagtgcgcacgatagcgcatagtgtttttctctccacttaaatcgaagagataaacttacggtgtaattccgtgagggtggcgtaaaccaaattacgcaatgttttgggttccattaaaatcgaaaccccttatttcctggatcacctgttaacgcacgtttgacgtgtattacagtgggaataagtaaaagtgagaggttcgaatcctccctaaccccgggtaggggccca

SEQ ID NO: 206 - DNA, 199 bp, Pepper mild mottle virus
  source 1..199: mol_type = other DNA
acatgatggcataaataagttgaacgaacattaaacgtccgtggcgagtacgataactcgtagtgtttttccctccacttaaatcgaagggttgtcgttgggatggaacgcaattaaatacatgtgtgacgtgtatttgcgaacgacgtaattatttttcaggggttcgaatcccccccgaaccgcgggtagcggccca

SEQ ID NO: 207 - DNA, 255 bp, Turnip crinkle virus
  source 1..255: mol_type = other DNA
tacggtaatagtgtagtcttctcatcttagtagttagctctctcttatattaagaaaagaaaacaaaaacccccaggtcgctttattttgacctgtgttagggaccaaaaacggtggcagcactgtctagctgcgggcattagactggaaaactagtgctctttgggtaaccactaaaatcccgaaagggtgggctgtggtgaccttccgaactaaaagatagcctccctcctcgcgcggggggggggcctgccc

SEQ ID NO: 208 - DNA, 370 bp, Tomato bushy stunt virus
  source 1..370: mol_type = other DNA
gacagactcttcagtctgagtttgtggagatgagtgtaaatctggcatagcatacaggttactcttgttgggttctggatgttaggatgacgagtcgactcgggctccgcactaggtttggtcgcctaggggatggagatatggaaagggtctcgtgtggtatcagtcggtcgaaagacgcgcttccaacatgggcctatggtcggataagtcttagcaataccagccagcatgaattggattcctgtttacgaaagttaggtgtcacttgtggaagcggacccagacacggttgatctcacccttcggggggctatagagatcgctggaagcactaccggacaaccggaacattgcagaaatgcagccc

SEQ ID NO: 209 - DNA, 241 bp, Tomato spotted wilt orthotospovirus
  source 1..241: mol_type = other DNA
attaatagtaatgctcaacaatgcatggataatggattagatagaacttagaatacaaatttattgttattttagaattaggttagatctgattagactaaagacgatttggtgaaccaaatctatagtgtatgtaaatgtggagtcccggtatagtttcactggagggaattcttatatatcttatttgtaaagtctggttatggagagattatatgttttagttgtacctgattgctct

SEQ ID NO: 210 - DNA, 215 bp, Watermelon bud necrosis orthotospovirus
  source 1..215: mol_type = other DNA
ataagccatagaatagacagtatagaaccagaagcagtaaaagagcatgacaacaaaagggttttttcttttgcaaaaggatgaaagtattctaaatcagtttaaaatgcaatgtagttgtagtatctagaatcaacagtagagtcagaaatagtatttcttaataaaattgagactgagtgtagaatacttttgttttgttgctcgattgctct

SEQ ID NO: 211 - DNA, 105 bp, Turnip yellow mosaic virus
  source 1..105: mol_type = other DNA
gttctcgatctttaaaatcgttagctcgccagttagcgaggtctgtccccacacgacagataatcgggtgcaactcccgcccctcttccgagggtcatcggaacc

SEQ ID NO: 212 - DNA, 4851 bp, Tobacco mosaic virus
  source 1..4851: mol_type = other DNA
atggcatacacacagacagctaccacatcagctttgctggacactgtccgaggaaacaactccttggtcaatgatctagcaaagcgtcgtctttacgacacagcggttgaagagtttaacgctcgtgaccgcaggcccaaggtgaacttttcaaaagtaataagcgaggagcagacgcttattgctacccgggcgtatccagaattccaaattacattttataacacgcaaaatgccgtgcattcgcttgcaggtggattgcgatctttagaactggaatatctgatgatgcaaattccctacggatcattgacttatgacataggcgggaattttgcatcgcatctgttcaagggacgagcatatgtacactgctgcatgcccaacctggacgttcgagacatcatgcggcacgaaggccagaaagacagtattgaactatacctttctaggctagagagaggggggaaaacagtccccaacttccaaaaggaagcatttgacagatacgcagaaattcctgaagacgctgtctgtcacaatactttccagacaatgcgacatcagccgatgcagcaatcaggcagagtgtatgccattgcgctacacagcatatatgacataccagccgatgagttcggggcggcactcttgaggaaaaatgtccatacgtgctatgccgctttccacttctctgagaacctgcttcttgaagattcatacgtcaatttggacgaaatcaacgcgtgtttttcgcgcgatggagacaagttgaccttttcttttgcatcagagagtactcttaattattgtcatagttattctaatattcttaagtatgtgtgcaaaacttacttcccggcctctaatagagaggtttacatgaaggagtttttagtcaccagagttaatacctggttttgtaagttttctagaatagatacttttcttttgtacaaaggtgtggcccataaaagtgtagatagtgagcagttttatactgcaatggaagacgcatggcattacaaaaagactcttgcaatgtgcaacagcgagagaatcctccttgaggattcatcatcagtcaattactggtttcccaaaatgagggatatggtcatcgtaccattattcgacatttctttggagactagtaagaggacgcgcaaggaagtcttagtgtccaaggatttcgtgtttacagtgcttaaccacattcgaacataccaggcgaaagctcttacatacgcaaatgttttgtcctttgtcgaatcgattcgatcgagggtaatcattaacggtgtgacagcgaggtccgaatgggatgtggacaaatctttgttacaatccttgtccatgacgttttacctgcatactaagcttgccgttctaaaggatgacttactgattagcaagtttagtctcggttcgaaaacggtgtgccagcatgtgtgggatgagatttcgctggcgtttgggaacgcatttccctccgtgaaagagaggctcttgaacaggaaacttatcagagtggcaggcgacgcattagagatcagggtgcctgatctatatgtgaccttccacgacagattagtgactgagtacaaggcctctgtggacatgcctgcgcttgacattaggaagaagatggaagaaacggaagtgatgtacaatgcactttcagagttatcggtgttaagggagtctgacaaattcgatgttgatgttttttcccagatgtgccaatctttggaagttgacccaatgacggcagcgaaggttatagtcgcggtcatgagcaatgagagcggtctgactctcacatttgaacgacctactgaggcgaatgttgcgctagctttacaggatcaagagaaggcttcagaaggtgctttggtagttacctcaagagaagttgaagaaccgtccatgaagggttcgatggccagaggagagttacaattagctggtcttgctggagatcatccggagtcgtcctattctaagaacgaggagatagagtctttagagcagtttcatatggcaacggcagattcgttaattcgtaagcagatgagctcgattgtgtacacgggtccgattaaagttcagcaaatgaaaaactttatcgatagcctggtagcatcactatctgctgcggtgtcgaatctcgtcaagatcctcaaagatacagctgctattgaccttgaaacccgtcaaaagtttggagtcttggatgttgcatctaggaagtggttaatcaaaccaacggccaagagtcatgcatggggtgttgttgaaacccacgcgaggaagtatcatgtggcgcttttggaatatgatgagcagggtgtggtgacatgcgatgattggagaagagtagctgtcagctctgagtctgttgtttattccgacatggcgaaactcagaactctgcgcagactgcttcgaaacggagaaccgcatgtcagtagcgcaaaggttgttcttgtggacggagttccgggctgtgggaaaaccaaagaaattctttccagggttaattttgatgaagatctaattttagtacctgggaagcaagccgcggaaatgatcagaagacgtgcgaattcctcagggattattgtggccacgaaggacaacgttaaaaccgttgattctttcatgatgaattttgggaaaagcacacgctgtcagttcaagaggttattcattgatgaagggttgatgttgcatactggttgtgttaattttcttgtggcgatgtcattgtgcgaaattgcatatgtttacggagacacacagcagattccatacatcaatagagtttcaggattcccgtaccccgcccattttgccaaattggaagttgacgaggtggagacacgcagaactactctccgttgtccagccgatgtcacacattatctgaacaggagatatgagggctttgtcatgagcacttcttcggttaaaaagtctgtttcgcaggagatggtcggcggagccgccgtgatcaatccgatctcaaaacccttgcatggcaagatcctgacttttacccaatcggataaagaagctctgctttcaagagggtattcagatgttcacactgtgcatgaagtgcaaggcgagacatactctgatgtttcactagttaggttaacccctacaccagtctccatcattgcaggagacagcccacatgttttggtcgcattgtcaaggcacacctgttcgctcaagtactacactgttgttatggatcctttagttagtatcattagagatctagagaaacttagctcgtacttgttagatatgtataaggtcgatgcaggaacacaatagcaattacagattgactcggtgttcaaaggttccaatctttttgttgcagcgccaaagactggtgatatttctgatatgcagttttactatgataagtgtctcccaggcaacagcaccatgatgaataattttgatgctgttaccatgaggttgactgacatttcattgaatgtcaaagattgcatattggatatgtctaagtctgttgctgcgcctaaggatcaaatcaaaccactaatacctatggtacgaacggcggcagaaatgccacgccagactggactattggaaaatttagtggcgatgattaaaaggaactttaacgcacccgagttgtctggcatcattgatattgaaaatactgcatctttagttgtagataagttttttgatagttatttgcttaaagaaaaaagaaaaccaaataaaaatgtttctttgttcagtagagagtctctcaatagatggttagaaaagcaggaacaggtaacaataggccagctcgcagattttgattttgtagatttgccagcagttgatcagtacagacacatgattaaagcacaacccaagcaaaaattggacacttcaatccaaacggagtacccggctttgcagacgattgtgtaccattcaaaaaagatcaatgcaatatttggcccgttgtttagtgagcttactaggcaattactggacagtgttgattcgagcagatttttgtttttcacaagaaagacaccagcgcagattgaggatttcttcggagatctcgacagtcatgtgccgatggatgtcttggagctggatatatcaaaatacgacaaatctcagaatgaattccactgtgcagtagaatacgagatctggcgaagattgggttttgaagacttcttgggagaagtttggaaacaagggcatagaaagaccaccctcaaggattataccgcaggtataaaaacttgcatctggtatcaaagaaagagcggggacgtcacgacgttcattggaaacactgtgatcattgctgcatgtttggcctcgatgcttccgatggagaaaataatcaaaggagccttttgcggtgacgatagtctgctgtactttccaaagggttgtgagtttccggatgtgcaacactccgcgaatcttatgtggaattttgaagcaaaactgtttaaaaaacagtatggatacttttgcggaagatatgtaatacatcacgacagaggatgcattgtgtattacgatcccctaaagttgatctcgaaacttggtgctaaacacatcaaggattgggaacacttggaggagttcagaaggtctctttgtgatgttgctgtttcgttgaacaattgtgcgtattacacacagttggacgacgctgtatgggaggttcataagaccgcccctccaggttcgtttgtttataaaagtctggtgaagtatttgtctgataaagttctttttagaagtttgtttatagatggctctagttgttaa

SEQ ID NO: 213 - DNA, 4851 bp, Tomato mosaic virus
  source 1..4851: mol_type = other DNA
atggcatacacacaaacagccacatcgtccgctttgcttgagaccgtccgaggtaacaataccttggtcaacgatcttgcaaagcggcgtctatatgacacagcggtagatgaatttaatgctagggaccgcaggcctaaagtcaatttttccaaagtagtaagcgaagaacagacgcttattgcaaccaaagcctacccagaattccaaattacattctacaacacgcagaatgctgtgcattcccttgcaggcggtctccgatcattagaattggaatatctgatgatgcaaattccctacggatcattgacatatgatatcggaggtaattttgcatctcatctgttcaaagggcgagcatacgttcactgctgtatgccgaatctagatgtccgcgacataatgcggcacgagggccaaaaggacagtattgaactatacctttctaggctcgagaggggcaacaaacatgtcccaaacttccaaaaggaagctttcgacagatacgctgaaatgccaaacgaagtagtctgtcacgatactttccaaacgtgtaggcattctcaagaatgttacacgggaagagtgtatgctattgctttgcatagtatatacgatatacctgccgacgagttcggcgcggcactgctgagaaagaatgtacatgtatgttatgccgctttccacttttccgagaatttacttctcgaagattcacacgtcaacctcgatgagatcaatgcatgtttccaaagagatggagacaggttgactttttcctttgcatctgagagtactcttaattatagtcatagttattctaatattcttaagtatgtttgcaaaacttacttcccagcctctaatagagaggtttacatgaaggagtttttagtaactagagttaatacctggttttgtaaattttctagaatagatactttcttattgtacaaaggtgtagcgcataagggtgtagatagtgagcagttttacaaggctatggaagacgcatggcactacaaaaagactcttgcgatgtgcaacagtgaaagaatcttgttagaggattcttcatcagttaattactggtttccaaaaatgagggatatggtgatagttccactatttgacatatctctcgagactagtaaaagaacacgcaaagaggtcttagtttcaaaggactttgtttatacagtgttaaatcacattcgtacgtaccaggccaaagcgcttacttactccaacgtgttatctttcgtcgaatcaattcgttcgagagtgatcattaacggggttactgccaggtctgagtgggatgtcgataaatcattattacagtccttgtcgatgacgttcttcctacataccaagcttgccgttctgaaagacgatcttttgattagcaagtttgcacttggaccaaaaactgtctcacaacatgtgtgggatgagatttccctagctttcggcaatgctttcccatcgatcaaggaaagattgataaaccggaaactgatcaaaattacggagaatgcgttagagatcagggtgcccgatctttatgtcactttccatgataggttagtttctgagtacaaaatgtcagtggacatgccggtgctagacattaggaaaaagatggaagaaactgaggaaatgtacaatgcactgtccgaactgtctgtacttaaaaattcagacaagttcgatgttgatgttttttcccagatgtgccaatctttagaagttgatccaatgactgcagcaaaggtaatagtagcagttatgagcaacgagagtggtcttactctcacgtttgaacagcccaccgaagctaatgttgcgctagcattgcaagattctgaaaaggcttctgatggggcgttggtagttacctcaagagatgttgaggaaccgtccataaagggttcgatggcccgtggtgagttacaattggccggattatctggcgacgttcctgaatcttcatacactaggagcgaggagattgagtctctcgagcagtttcatatggcaacagctagttcgttaattcataagcagatgtgttcgatcgtgtacacgggccctcttaaagttcaacaaatgaaaaactttatagacagcctggtagcctcgctctctgctgcggtgtcgaatctagtgaagatcctaaaagatacagccgcgattgaccttgaaactcgtcaaaagttcggagttctggatgttgcttcgaaaaggtggctagttaaaccatccgcaaagaaccatgcatggggggttgttgagactcatgcgaggaaatatcacgtcgcattactggagcacgatgaatttggcattattacgtgcgataactggcgacgggtggctgtgagttctgagtcggtagtatattctgatatggctaaactcaggactctgagaagattgctcaaagatggagaaccacacgttagttcagcaaaggtggttttggtggatggcgttccagggtgcgggaagacaaaggaaattctttcgagagttaatttcgaagaagatctaattcttgtccctggtcgtcaagctgccgagatgatcagaagaagagctaatgcgtcgggcataatagtggctacaaaggataatgtgcgcaccgtcgattcatttttgatgaattacgggaaaggggcacgctgtcagttcaaaagattgttcatagacgaaggtttgatgctgcatactggttgtgtgaatttcttggttgaaatgtctctgtgcgatattgcatatgtttatggagacacccaacaaattccgtacatcaacagagtaactggtttcccgtaccctgcgcactttgcaaaattggaggtcgacgaagtcgaaacaagaagaactactcttcgctgtccggctgatgtcacacacttcctaaatcaaaggtatgaaggacacgtaatgtgcacgtcttctgaaaagaaatcagtttcccaggaaatggttagtggggctgcgtctatcaatcctgtgtccaagccgcttaaagggaaaattttgactttcacacagtctgacaaggaggcccttctctcaaggggctacgcagatgtccatactgtacatgaggtacaaggtgagacttatgcagacgtatcgttagttcgactaacacctacgcctgtatctatcatcgcaagagacagtccgcatgttctggtctcgttgtcaagacacacaaaatccctaaagtactacaccgttgtgatggatcctttagttagtatcattagagatttagaacgggttagtagttacttattagacatgtacaaagtagatgcaggtactcaatagcaattacaggtcgactctgtgtttaaaaatttcaatctttttgtagcagctccaaagactggagatatatctgatatgcaattttactatgataagtgtcttcctgggaacagcacgttgttgaacaactacgacgctgttaccatgaaattgactgacatttctctgaatgtcaaagattgcatattagatatgtctaagtctgtagctgctccgaaagatgtcaaaccaactttaataccgatggtacgaacggcggcagaaatgcctcgccagactggactgttggaaaatctagttgcgatgattaaaagaaattttaattcaccagagttgtccggagtagttgatattgaaaatactgcatctttagtggtagataagttttttgatagttatttacttaaggaaaaaagaaaaccaaacaaaaatttttcactgtttagtagagagtctctcaataggtggatagcaaagcaagaacaagtcacaattggtcagttggccgattttgattttgtggatcttccagccgttgatcagtacaggcatatgattaaagcgcaaccgaagcagaaactggatctgtcaattcagacagaatatccagcgttgcaaacgattgtgtatcattcaaagaaaatcaacgcaatatttggtcctcttttcagtgagcttacaaggcaattacttgacagtattgactcaagcagattcttgttctttacgagaaagacaccggctcagatcgaagatttcttcggagatctagacagtcatgtcccaatggacgtacttgagttggatgtttcgaagtatgataagtctcaaaacgagtttcattgtgctgttgagtacgaaatctggaggagactgggtctggaggatttcttggcagaagtgtggaaacaagggcatagaaaaaccaccctgaaagattacactgctggtataaaaacgtgtttatggtaccagagaaagagtggtgatgttacaacttttatcggtaataccgtcatcattgcttcgtgtcttgcatcaatgctcccgatggaaaaattgataaaaggagccttctgcggagatgacagtttgttgtactttcctaagggttgtgagtatcccgatatacaacaagctgccaatctaatgtggaattttgaggccaaactgttcaagaagcaatatgggtacttctgcgggaggtacgtgattcatcacgatagaggttgcatagtatactacgaccctttgaagctgatttcgaaacttggtgctaaacacatcaaggattgggatcatttggaggagttcagaagatccctctgtgatgttgctgagtcgttgaacaattgcgcgtattacacacaattggacgacgctgttggggaggttcataaaaccgccccacctggttcgtttgtttataagagtttagttaagtatttgtcagataaagttttgtttagaagtttatttcttgatggctctagttgttaa

SEQ ID NO: 214 - DNA, 4806 bp, Turnip vein-clearing virus
  source 1..4806: mol_type = other DNA
atggcacaatttcaacaaacaattgacatgcaaactctccaagccgctgcgggacgcaacagcttggtgaatgatttggcatctcgtcgcgtttacgataatgcagtcgaggagctgaatgctcgttccagacgtcccaaggttcatttctccaaggcagtgtctacggaacagacactgattgcaacaaacgcatatccggagttcgagatttcctttactcatacgcaatccgctgtgcactccttggccggaggccttcggtcacttgagttggagtatctcatgatgcaagttccgttcggttctctgacgtacgacatcggcggtaacttttccgcgcaccttttcaaagggcgcgattacgttcactgctgcatgcctaatctggatgtacgtgacattgctcgccatgaaggacacaaggaagctatttacagttatgtgaatcgtttgaaaaggcagcagcgtcctgtgcctgaataccagagggcagctttcaacaactacgctgagaacccgcacttcgtccattgcgacaaacctttccaacagtgtgaattgacgacagcgtatggcactgacacctacgctgtagctctccatagcatttatgatatccctgttgaggagttcggttctgcgctactcaggaagaatgtgaaaacttgtttcgcggcctttcatttccatgagaatatgcttctagattgtgatacagtcacactcgatgagattggagctacttttcagaagtccggtgataatttaagttttttctttcataatgagagcactctcaattacacccacagttttagtaatataattaagtatgtgtgtaaaacgttctttcctgctagtcaacggtttgtgtatcataaggagtttttagttactagagtcaacacttggtactgtaagtttacgagagtggatacttttactcttttccgtggtgtgtaccataataatgtggattgcgaagagttttacaaggctatggacgatgcgtggcactacaaaaagacgttagcaatgcttaatgccgagaggaccatcttcaaggataacgctgcgttaaacttttggttcccgaaagtgagagacatggttatcgtccctctctttgacgcttctatcacaactggtaggatgtctaggagagagattatggtgaacaaggatttcgtttatacggtcctaaatcacataaaaacgtatcaagctaaggctttaacttacgcaaatgttctgtcctttgtggagtctattaggtctagagtgataattaacggtgtcactgccaggtctgaatgggacacagacaaggcaattctaggtccattagcaatgacatttttccttataacaaagttgggtcatgtgcaggatgaaataatcctgaaaaagttccagaagttcgacagaaccaccaatgagctgatttggacaagtctctgcgatgccctgatgggggttattccctcggtcaaggagacgcttgtgcgcggtggttttgtgaaagtagcagaacaagccttagagataaaggttcccgagctatactgtacctttgccgacagattggtactacagtacaagaaggcggaggagttccaatcgtgtgatctttccaaacctctagaagagtcagagaagtactacaacgcattatccgagctatcagtgcttgagaatctcgactcttttgacttagaggcgtttaagactttatgtcagcagaagaatgtggacccggatatggcagcaaaggtggtcgtagcaatcatgaagtcagaattgacgttgcctttcaagaaacctacagaagaggaaatctcggagtcgctaaaaccaggagaggggtcgtgtgcagagcataaggaagtgttgagcttacaaaatgatgctccgttcccgtgtgtgaaaaatctagttgaaggttccgtgccggcgtatggaatgtgtcctaagggtggtggtttcgacaaattggatgtggacattgctgatttccatctcaagagtgtagatgcagttaaaaagggaactatgatgtctgcggtgtacacagggtctatcaaagttcaacaaatgaagaactacatagattacttaagtgcgtcgctggcagctacagtctcaaacctctgcaaggtgcttagagatgttcacggcgttgacccagagtcacaggagaaatctggagtgtgggatgttaggagaggacgttggttacttaaacctaatgcgaaaagtcacgcgtggggtgtggcagaagacgccaaccacaagttggttattgtgttactcaactgggatgacggaaagccggtttgtgatgagacatggttcagggtggcggtgtcaagcgattccttgatatattcggatatgggaaaacttaagacgctcacgtcttgcagtccaaatggtgagccaccggagcctaacgccaaagtaattttggtcgatggtgttcccggttgtggaaaaacgaaggagattatcgaaaaggtaaacttctctgaagacttgattttagtccctgggaaggaagcttctaagatgatcatccggagggccaaccaagctggtgtgataagagcggataaggacaatgttagaacggtggattccttcttgatgcatccttctagaagggtgtttaagaggttgtttatcgatgaaggactaatgctgcatacaggttgtgtaaatttcctactgctgctatctcaatgtgacgtcgcatatgtgtatggggacacaaagcaaattccgttcatttgcagagtcgcgaactttccgtatccagcgcattttgcaaaactcgtcgctgatgagaaggaggttagaagagttacgctcaggtgcccggctgatgttacgtatttccttaacaagaagtatgacggggcggtgatgtgtaccagcgcggtagagagatccgtgaaggcagaagtggtgagaggaaagggtgcattgaacccaataaccttaccgttggagggtaaaattttgaccttcacacaagctgacaagttcgagttactggagaagggttacaaggatgtgaacactgtgcacgaggtgcaaggggagacgtacgagaagactgctattgtgcgcttgacatcaactccgttagagatcatatcgagtgcgtcacctcatgttttggtggcgctgacaagacacacaacgtgttgtaaatattacaccgttgtgttggacccgatggtgaatgtgatttcagaaatggagaagttgtccaatttccttcttgacatgtatagagttgaagcgggggtccaatagcaattacagatcgatgcagtattcagggacagcaacttgtttgttcagacgcccaagtcaggagattggcgagatatgcaattttactatgacgctcttcttcccggaaacagtactattctcaatgaatttgatgctgttacgatgaatttgagggatatttccttaaacgtcaaagattgcagaatcgacttctccaaatccgtgcaacttcctaaagaacaacctattttcctcaagcctaaaataagaactgcggcagaaatgccgagaactgcaggtttgctggaaaatttggttgcaatgatcaaaagaaacatgaatgcgccggatttgacagggacaattgacattgaggatactgcatctctggtggttgaaaagttttgggattcgtatgttgacaaggaatttagtggaacgaacgaaatgaccatgacaagggaaagtttttctagatggctttcgaaacaagagtcatctacagttggtcagttagcggactttaactttgtggatttgccggcagtagatgagtacaagcatatgatcaagagtcaaccaaagcaaaagttagacttgagtattcaagacgaatatcctgcattgcagacgatagtctaccattcgaaaaagatcaatgcgattttcggtccaatgttttcagaacttacgaggatgttactcgaaaggattgactcttcgaagtttctgttctacaccagaaagacacctgcacaaatagaggacttcttttctgacctagactcaacccaggcgatggaaattctggaactcgacatttcgaagtacgataagtcacaaaacgagttccattgtgctgtagagtacaagatctgggaaaagttaggaattgatgagtggctagctgaggtatggaaacaaggacacagaaaaacgaccttgaaagattatacggccggagtcaaaacatgtctttggtatcaaaggaaaagtggtgatgtgacaacctttattggtaataccatcatcattgcagcctgtttgagctcaatgatccccatggacaaagtgataaaggcagctttttgtggagacgatagcctgatttacattcctaaaggtttagacttgcctgatattcaggcgggcgcgaacctcatgtggaacttcgaggccaaactcttcaggaagaagtatggttacttctgtggtcgttatgttattcaccatgatagaggagccattgtgtattacgatccgcttaaactaatatctaagttaggttgtaaacatattagagatgttgttcacttagaagagttacgcgagtctttgtgtgatgtagctagtaacttaaataattgtgcgtatttttcacagttagatgaggccgttgccgaggttcataagaccgcggtaggcggttcgtttgctttttgtagtataattaagtatttgtcagataagagattgtttagagatttgttctttgtttga

SEQ ID NO: 215 - DNA, 4839 bp, Pepper mild mottle virus
  source 1..4839: mol_type = other DNA
atggcttacacacaacaagctaccaacgccgcattagcaagtactctccgagggaataaccccttggtgaacgatcttgctaatcggagactgtacgaatcagcggtcgaacaatgcaatgcacatgaccgcaggcccaaggttaattttttaaggtcgataagcgaagagcagacgcttatcgcaactaaggcctaccctgagttccaaatcacgttctacaacacgcagaacgctgtgcacagtctcgcaggtggacttcggtctttggaactagaatacttgatgatgcagatcccctacggttcaacgacatatgatatcgggggaaattttgctgctcacatgtttaaaggtcgtgactacgttcattgctgcatgcctaacatggacttacgtgacgtcatgcgtcacaatgctcaaaaggatagcattgaactgtacctttcaaagcttgcgcaaaagaaaaaggtaataccgccatatcaaaagccatgctttgataaatacacggacgatccgcaatcagtagtgtgctcgaaaccttttcagcactgcgaaggcgtttcgcactgcacggataaagtatacgctgtcgctttgcacagtttatacgacattccagcagatgaatttggggcagcacttctgaggagaaatgttcatgtctgctatgctgccttccacttttctgagaatcttcttttagaagattcgtatgtcagtcttgacgacataggcgctttcttctcgagagagggcgatatgttgaacttttcttttgtagcagagagtactttaaattatactcattcctatagtaatgtgcttaagtatgtgtgtaagacttacttccccgcttctagtagagaagtgtacatgaaggagtttttggtaactagggtaaatacttggttttgtaagttttcaaggttagatacctttgtactatatagaggtgtataccacagaggtgtagacaaggagcaattttacagtgcaatggaagatgcttggcattacaaaaagactttggcgatgatgaatagcgaaagaatcctcttagaggattcatcgtctgttaattattggtttccaaagatgaaagatatggtgatagtacctttgttcgacgtatctttacagaacgaggggaaaaggttagcaagaaaggaggtcatggtcagcaaggacttcgtttatactgtgcttaatcatattcgcacataccagtcgaaagcgcttacttacgccaatgtattatcgttcgttgagtcgataagatcaagagtgataatcaatggggtgactgcgcgctcagagtgggatgtggataaggctttgttgcagtccctgtcaatgacttttttcttgcagaccaaattggccatgctcaaggatgacctcgtggttcagaaattccaagtgcattccaaatcgctcactgaatatgtctgggatgagattactgctgcttttcacaattgttttcctacaatcaaggagaggttgattaacaagaaactcataactgtttcggaaaaggctcttgaaattaaagtacctgatttgtatgtaactttccacgatagattggttaaggagtacaagtcttcggtggaaatgccggtactggacgttaaaaagagcttggaagaagcagaagtgatgtacaatgctttgtcagaaatctcaattcttaaagacagtgacaagtttgatgttgatgttttttcccggatgtgtaatacattaggcgtagatccattggtggcagcaaaggtaatggtagctgtggtttcaaatgagagtggtttgaccttaacgtttgagaggcctaccgaagcaaatgtcgcacttgcattgcaaccgacaattacatcaaaggaggaaggttcgttgaagattgtgtcgtcagacgtaggtgagtcctcaatcaaggaagtggttcgaaaatcagagatttctatgcttggtctaacaggcaacacagtgtccgatgagttccaaagaagtacagaaatcgagtcgttgcagcagttccatatggtatccacagagacgattatccgtaaacagatgcatgcgatggtgtatactggtccgctaaaagttcaacaatgcaagaactatttagacagcctggtagcctcgctctctgctgcggtatcaaacctgaagaagataatcaaagacacagctgctatagatctcgagactaaggaaaaatttggagtctacgacgtgtgccttaagaaatggttggtgaaacctctatcaaaaggacatgcttggggtgtggtgatggactcagactataagtgctttgttgcgcttctcacatacgatggcgagaacattgtgtgcggagagacatggcgtagagtcgcagtgagctccgaatctttggtgtattcagatatggggaagataagagctatacgctctgtgcttaaagacggtgaaccccatataagcagtgcaaaggttacacttgttgatggtgttcctggttgcggaaagacaaaggagattctttcgagggtcaactttgacgaagatctagttctggtaccaggaaaacaggctgctgaaatgataagaagaagggcaaacagttctggtttaatcgtggcgaccaaggagaatgtaaggacggtagactctttcttaatgaattacggtcgaggtccgtgccaatacaaaaggctgtttctggatgaaggtctaatgttacaccctggttgtgttaattttctggttggcatgtctctatgctccgaggcttttgtttatggagacacccagcagattccttacatcaacagagttgcaacttttccctatcctaagcatttgagtcaactcgaggtcgatgctgttgaaactcgcagaacaacgttgcggtgtccagctgatatcaccttcttcttgaatcagaagtacgaagggcaagttatgtgcacatcaagtgttacacgctcggtgtcacacgaggtcatccaaggtgcagcggtaatgaatccagtgtctaaaccacttaaagggaaggtgattacattcactcagtcagacaagtcattgctgctctcgaggggttacgaagatgtgcataccgttcatgaggtgcaaggggaaacgtttgaagacgtctcactagtgaggctgacgccaacacccgtgggaataatttcaaagcagagtccgcacctgttggtctcattgtctaggcatacaaggtcgatcaaatattacacagttgtgctagatgcagtcgtttcagtgcttagagatctggagtgtgtgagtagttacctgttagatatgtacaaagttgatgtgtcgactcaatagcaattacagatagaatcggtgtacaaaggtgttaaccttttcgtcgcagcaccaaaaacaggagatgtttctgacatgcaatattattacgacaagtgtttgccgggaaacagtactatactcaatgagtatgatgctgtaactatgcaaatacgagagaatagtttgaatgtcaaggattgtgtgttggatatgtcgaaatcggtgcctcttccgagagaatctgagacgacattgaaacctgtgatcaggactgctgctgaaaaacctcgaaaacctggattgttggaaaatttggtcgcgatgatcaaaagaaatttcaactctcccgaattagtaggggttgttgacatcgaagacaccgcttctctagtagtagataagttttttgatgcatacttaattaaagaaaagaaaaaaccaaaaaatatacctctgctttcaagggcgagtttggaaagatggatcgaaaagcaagagaagtcaacaattggccagttggctgattttgactttattgatttaccagccgttgatcaatacaggcacatgatcaagcagcagccgaaacagcgtttggatcttagtattcaaactgaatacccggctttgcaaactattgtgtatcatagcaagaaaatcaatgcgctttttggtcctgtattttcagaattaacaagacagctgctagagacaattgacagttcaagattcatgttttatacaaggaaaacgcctacacagatcgaagaatttttctcagatctggactctaatgttcctatggacatattagagctagacatttccaagtatgacaaatcacagaacgaatttcattgtgcagtcgagtatgagatttggaaaaggttaggcttagacgatttcttggctgaagtttggaaacacgggcatcggaagacaacgttgaaagactacacagccggaataaaaacgtgtttgtggtaccagaggaaaagcggtgatgtcaccacattcattggaaacacgatcattattgctgcatgtctgtcctctatgctaccgatggagagattgattaaaggtgccttttgtggtgatgatagtatattatactttccaaagggcactgatttccccgatattcaacagggcgcaaaccttctctggaattttgaagccaagttgtttaggaagagatatggttacttttgcggtaggtacataattcaccatgacagaggctgtattgtatattatgaccctctaaaattgatctcgaaactcggtgcaaaacacatcaagaatagagaacatttagaggaatttaggacctctctttgtgatgttgctgggtcgttgaacaattgtgcgtactatacacatttgaacgacgctgtcggtgaggttattaagaccgcacctcttggttcgtttgtttatagagcattagttaagtacttgtgtgataaaaggttatttcaaacattgtttttggagtaa

SEQ ID NO: 216 - DNA, 2391 bp, Turnip crinkle virus
  source 1..2391: mol_type = other DNA
atgcctcttctacacacactcaacacagcgctcgcagtgggactcctaggagccaggtactaccctgaggttcaaaccttcttggggctgcctgactacgtgggtcacatgaagaatgtagtacggtctgttttccagggatctgggctagtagtagtgtcctccgacacagtcggtgtcagggggacgtatagtaatagaggtcagataggtagtagtctcgggtgtatactagccgttccggatagcggggcggatatagaaatagacttagataggttggtaggaacggaagaggaagccacatcctgtttggtggaggcggtaggtagtaccgcagatgtccccaggaggagagttcgtcaaaaggggcggtttgccatgcatgccgtcaacgcagcaaagctgcacttttgtggcgtcccaaaacccactgaagcgaatcgactagcggtctcaaaatggcttgtccaatactgcaaagagagacatgtcgtagacagccacatcagaacgatagtcaatacggctcttcctagagtgttcacgcctgacgcggaagacattcaggtcgtgctggatttgcacagtgtaagagcacacgaccaccgcaacgccctagccgaagcaggcaaagtgcggaagtggtgggtcaatctcgcgatgcatcccatgactgggaggtcgtggtccagggcttggaggcgattatgccgactgcctgacgaccaggcgatctcttttgtccgctaggggtgcttgcgggagctggtcgggagggagactcaaatctccaggggtgaaaacccggccatgcgcgtgttcccgttagcaaatcccccgaaggttcgacgcatcttccatatctgtggaatgggcaatggtttagactttggagtccacaacaactcactcaacaatttgagaagagggttgatggaaagagtcttttacgttgaagatgcgcagaagcaattgaaaccagccccccaaccgatcccagggattttcgggaagttgagtgggattcggagacgattggtcaggttggccggaaatcatacccctgtgcctcgggagaaatacccgtcgttctacaagggcaggagggccaccatataccaaaaggctttggattctctacatgacagaccggtatcccggaaggacgcagaactcaaaacattcgtgaaggcagaaaagatcaatttcacggctaagaaagacccggctccacgggtcatccagccgagggacccacgatataatattgaggttgggaaatacttgaaaccgtacgagcaccatttatatcgggcaattgacgctatgtggggtgggcccactgtgctgaaaggatacgatgtgggggagcttggaaacattatgagtaacacctgggataaattccggaaaacgtgtgcgataggatttgacatgaagagattcgaccagcacgtatccgtggacgccctacgatgggaacacagtgtatacaacgcgggctttaactgtcccgagttggcacagctgctaacttggcagttgaccaacaagggggttgggagagcctccgatggctttatcaaataccaagttgatggttgtcgcatgtccggagatgttaacacagccttgggcaactgcctactggcttgctctatcaccaagtacttaatgaagggaatcaaatgcaaattaatcaacaatggagacgattgtgtgctgttcttcgaagctgatgaagtcgacagggtgcgcgaaaggctgcatcattggatcgactttgggtttcaatgcatagcggaagaaccacaatacgaattggagaaagttgaattttgccagatgtcccctattttcgatggtgaagggtgggtcatggtcagaaacccccgtgtgagcctctccaaggacagctacagcaccacacaatgggcgaatgagaaagatgcagccagatggttggctgccatcggagagtgtggcttggctattgcaggtggcgtaccagtgttacaatcatattattcttgcctgaagaggaattttggacccctggccggggactacaagaagaagatgcaagatgtttcctttgatagtggattctacaggttatccaagaacgggatgaggggcagcaaagacgtgtcccaagatgctaggttcagcttttaccgggggttcggctacactccagacgagcaggaagcgcttgaggagtactacgacaacctcgaactgctctgtgagtgggaccccacgggatataaagaagaacttagtgatagatggatcctgaacgaattccctacaactctctaagcgacagcgacgcaacaggaaaacggaagaaaggcggagagaaaagtgcgaagaagagattgg

SEQ ID NO: 217 - DNA, 816 bp, Turnip crinkle virus
  source 1..816: mol_type = other DNA
atgcctcttctacacacactcaacacagcgctcgcagtgggactcctaggagccaggtactaccctgaggttcaaaccttcttggggctgcctgactacgtgggtcacatgaagaatgtagtacggtctgttttccagggatctgggctagtagtagtgtcctccgacacagtcggtgtcagggggacgtatagtaatagaggtcagataggtagtagtctcgggtgtatactagccgttccggatagcggggcggatatagaaatagacttagataggttggtaggaacggaagaggaagccacatcctgtttggtggaggcggtaggtagtaccgcagatgtccccaggaggagagttcgtcaaaaggggcggtttgccatgcatgccgtcaacgcagcaaagctgcacttttgtggcgtcccaaaacccactgaagcgaatcgactagcggtctcaaaatggcttgtccaatactgcaaagagagacatgtcgtagacagccacatcagaacgatagtcaatacggctcttcctagagtgttcacgcctgacgcggaagacattcaggtcgtgctggatttgcacagtgtaagagcacacgaccaccgcaacgccctagccgaagcaggcaaagtgcggaagtggtgggtcaatctcgcgatgcatcccatgactgggaggtcgtggtccagggcttggaggcgattatgccgactgcctgacgaccaggcgatctcttttgtccgctaggggtgcttgcgggagctggtcgggagggagactcaaatctccaggggtgaaaacccggccatg

SEQ ID NO: 218 - DNA, 2457 bp, Tomato bushy stunt virus
  source 1..2457: mol_type = other DNA
atggagaccatcaagagaatgatttggcctaagaaagagatttttgtgggtgatttcgcaaccggagtgaataggacagttccggtgaacatctttcaattggtgtgtcgtgtggttctgagatacatgaggacagggaaaatagagtgtgattctgacagcatgactaagtttatagttgaattactcaaaactgattgtgctgccaaatgggaatggttcatgaagagacggcagaggggtgattacattgtccctctatctatagcctccataccaatcataccgctgttgagttatgccactagggtacgcgcagtctcagtcaaggcttttggcaatgaactatcgttcaatgtcagggtgcctagaccatctgtacctaagaaaggattgctcctcagactggcggcaggtctagcgttagctcctatatgcgcgctggccgtgtacgctaccctacctagggaaaaactgtcggtatttaagctgagaactgaggcacgagcacacatggaggatgagagagaagcgacagattgtctggtggttgagccggcaagggaacttaagggtaaagatggtgaggatctcctcactggtagtagattgactaaggtgatcgcgtccactgggcgccctcgtcgaagaccttatgcggcaaagatcgcacaggtggcgagagcaaaggtgggttaccttaagaacagtccagagaatagactaatctaccagagggtgatgatcgagatcatggacaaagactgcgtcaggtatgttgacagggatgtcatattgcctttggctattggatgctgttttgtctatccggatggagtggaggagtcggcggcactatggggctcacaggagtccctgggtgtcaaatagggaggcctagtacgtctacctggggttgtaacacagatcaatcgagatatcccatctgatgtgttacttcctcaggaggtgctagaggttcgtacaggacctcccaatgctaaggaccgtaatatatttatggttgcaggttgcccatcacaggcacggttcttagtacataatcactgcctgaaaaaccttaaaaggggtcttgtggagagagtcttctgcgtagagagaaacgggaagctcgctcgcactccacaacctaccaaaggagcctttggacgtctttccccgttcaggaaagcggtttgtgagaaggttggggtagcccaccgacttgggtatgatgggtttctgtcatactacagcggtgcgaaactccgtacttacacacgagccgtggagagtctgcatatcacacctgtctccgagagggatagtcacttgactaccttcgtaaaagcagagaagatatcgacgtctaagggtgacccagcacctcgggtgattcagcctcgaaacccgaggtacaatgtggaacttggaagatatctacggcatatggaatccaagctgatgaaagctgttgatggcgtgttcggagagacgacatgcatcaaaggatacacagctgatgaggtaggtgcaattttccgggctaaatgggacaggtttgataagcctgtcgccatagggctcgatgcatctaggtttgatcaacactgttccgttgaagcattgcaatatgagcatagcttctacagggccatgtaccctggcaacaagctcttgggcaagttgttggaatggcagctccataataaaggtaaaggttatgttccagatggaactataacctatcgcaaggagggctgtcgcatgagtggggatataaacacctcgttgggcaactatctactgatgtgtgcaatggtacatgggtacatgcgtcatctggggattaatgagtttagtctggcaaactgtggggatgattgcgtcctaattgtcgaacgcaggaatcttaagcagatacagagaactttaccggagtatttcctcaatctgggatatactatgaaggtggagcaacctgtatttcaactggaagaggttgaattttgccaggcacacccagtacagtttcaaggcggttggaagatggttcgaaacgtccgtactgctatgagcaaggatgtgcactgtgtcaacaatatacgcgatttggcgacgaggagagcttggagtaatgctcaacatcatgggggtctagcgcttagtgctggtattccagttgtggagacgttttactctaggtttaagctttatgatgtacctcgtaaacatcaacgtattgacacggtcacaaatgtgcacaagtggcgtggatccggtgggagttatgttgtgacccctgaatctagggctagcttttgggctgcctttggactcacgggggatgagcaactggctctggaggaccgtctggaaagatgggagatggatctgtttggagaggagggtgttgacgctcatgagcccagcatcctcgactccgccgtagcttga

SEQ ID NO: 219 - DNA, 891 bp, Tomato bushy stunt virus
  source 1..891: mol_type = other DNA
atggagaccatcaagagaatgatttggcctaagaaagagatttttgtgggtgatttcgcaaccggagtgaataggacagttccggtgaacatctttcaattggtgtgtcgtgtggttctgagatacatgaggacagggaaaatagagtgtgattctgacagcatgactaagtttatagttgaattactcaaaactgattgtgctgccaaatgggaatggttcatgaagagacggcagaggggtgattacattgtccctctatctatagcctccataccaatcataccgctgttgagttatgccactagggtacgcgcagtctcagtcaaggcttttggcaatgaactatcgttcaatgtcagggtgcctagaccatctgtacctaagaaaggattgctcctcagactggcggcaggtctagcgttagctcctatatgcgcgctggccgtgtacgctaccctacctagggaaaaactgtcggtatttaagctgagaactgaggcacgagcacacatggaggatgagagagaagcgacagattgtctggtggttgagccggcaagggaacttaagggtaaagatggtgaggatctcctcactggtagtagattgactaaggtgatcgcgtccactgggcgccctcgtcgaagaccttatgcggcaaagatcgcacaggtggcgagagcaaaggtgggttaccttaagaacagtccagagaatagactaatctaccagagggtgatgatcgagatcatggacaaagactgcgtcaggtatgttgacagggatgtcatattgcctttggctattggatgctgttttgtctatccggatggagtggaggagtcggcggcactatggggctcacaggagtccctgggtgtcaaatag

SEQ ID NO: 220 - DNA, 8640 bp, Tomato spotted wilt orthotospovirus
  source 1..8640: mol_type = other DNA
atgaacatccagaaaatacaaaaattaatagaaaatggaaccactttattgttatctattgaggattgtgtaggttctaaccatgatctggctttggatttacataagagaaatagtgatgagattccagaagatgtgattattaataataatgcaaaaaactatgagacgatgagagaattaattgtcaaaatcactgctgatggagaagggctaaacaaagggatggcaactgtggatgttaagaagctaggtgagatggtctctctgtttgagcaaaaatacttagaaacagagttagcaaggcatgatattttcggagagctgatctccagacacctaagaataaaacccaaacaaagaagcgaggtggagatagagcatgcactcagagaatatctggatgatctcaacaaaaagtcctgtgttaacaagctttctgatgatgagtttgagagaataaacaaagaatatgtggcaactaacgccacccctgataactatgtaatatataaagaatcaaaaaacagtgaactctgtttaatcatttatgattggaaaatatctgttgatgccaggactgaaaccaaaacaatggaaaaatactacaaaaatatctggaaatctttcaaagatataaaagtgaatggaaagccattcctagaagatcaccctgttttcgtttctattgttatattgaaacctattgctggaatgccaatcactgttactagcagtagggtattgggaaaatttgaagactctccatcagcattgcatggagaaagagtaaagcatgctagaaatgccaaactgctaaatatttcttatgttggaaaaatcgtaggaaccacgcccacagtggtgagaaactattatgcaaacactcagaaaatcaaatctgaagtcagaggaatcttaggtgatgattttggatccaaagatgtgttttttagtcactggactagcaaatacaaagagagaaatcctactgaaatagcctattctgaagatattgaaagaataattaactcacttgttacagaagaaatccctaaggaagagataatacattttttgtttggaaatttctgtttccacattgaaacgatgaatgaccagcatattgctgacaaatttaaagggtaccaaaactcttgtattaatttaaaaatagagccaaaagctgatttagctgatttgaaagaccacttgatccaaaaacagcaaatatgggaatctttgtatgggaaacaccttgagaagatcatgcttagaattagagaaaaaaagaaaaaagagaaagaaatacctgacataactacagcttttaaccagaatgccacagaatatgaagaaaagtatcctaactgttttacaaacgatctttctgaaactaaaactaacttttccatgacttggtccccaagttttgaaaaaattgaattgggctcagaagtagattacaataacgcaatcataaacaaatttcgggaaagcttcaaaagttcttcaagaattatttacaatagcccatatagtagcataaataaccaaacaaacaaagcaagagatataacaaacttggttagactgtgtttaacagagttaagttgtgatacaacaaaaatggaaaaacaggaacttgaggatgaaatagatataaacactgggagcattaaagttgagagaacaaaaaaatctaaagaatggagtaagcagggttcatgtttgaccaggaacaaaaatgaattttgcatgaaagagacaggcaaggagaacaaaactacctattttaaaggtttagcagtaatgaatataggaatgagctctaagaaaagaattctaaaaaaagaagaaataaaagaaaggatttctaaaggcctggaatatgatacctcagaaaggcaggctgacccaaatgatgattattcaagtatagacatgtcttctctgactcataggaaaaaactaattaggcacgacaatgaggacagcttaagctggtgtgaaagaattaaagattctttgtttattcttcataatggtgatataagagaggaaggcaagatcacatctgtttacaataattatgctaaaaatcccgaatgcttgtacattcaagattcagtattgaaagctgaactggagacttgtaaaaaaataaacaaattatgcaatgacctagccatttaccattactctgaagacatgatgcaattctccaaaggtttgatggtggcagacaggtatatgactaaagaaagtttcaagatactaactacagcaaatactagcatgttgctactggcatttaaaggagatggaatgaacaccggaggatcgggagttccttacatagcattgcacatagtggatgaagacatgtcagatcaatttaacatatgttatactaaagaaatttatagctatttccgaagtggtagtaattacatttatataatgagaccgcagagactcaaccaggtgaggctgctgagccttttcaaaacgcctagcaaagttcctgtatgttttgcacaattttcaaagaaagctaacgaaatggaaaaatggctgaaaaacaaagatatagaaaaagtgaatgtcttttctatgacaatgactgtaaaacagatattaataaatattgtattctcgtctgtcatgataggtactgtgacaaagctcagcaggatgggaatttttgatttcatgcggtatgctgggtttttgccactgtctgattattctaatataaaagaatacattagagataaatttgaccctgatataactaacgtggcagatatatattttgttaatggaatcaaaaaactattgttcagaatggaagatctcaatttaagcacaaatgccaagcctgttgtcgtagaccacgaaaacgatattataggaggtataacaaacttgaatataaaatgtccaataacaggatcgactttactaacactagaggatttgtacaataatgtttatttggctatttatatgatgcctaaatcattgcacaatcatgttcacaatctaacaagtttgttaaatgtccctgctgagtgggagctaaagttcagaaaagaattaggtttcaacatatttgaagacatataccctaagaaagcaatgtttgacgacaaagacctattctctataaatggagctctgaacgtgaaagcattatccgattactatctagggaatatagacaatgttggtttgatgagatcagaaatagaaaataaagaagatttcctgagcccgtgttacaagatatctactttaaaatcttcaaaaaagtgctcacaatcaaacattataagcactgatgagataatagagtgtctccagaacgcaaagattcaagatatagaaaactggaaagggaataatttggctattataaaagggcttataagaacttacaatgaggaaagaaatcgattagtggaattctttgaagataattgtgtcaattcgttgtatcttgtagaaaagcttaaagagataattaatagtggattgataactgcagggaaatctgtaacatccaaattcataagaaataaccatccattaacagtagaaacatatctcaaaacaaaactatattatagaaataatgtaacagttttaaagtctaaaaaagtgtcagaggagctttatgaccttgtaaaacagtttcataacatgatggaaatagatctagattctgttatgaaccttggtaaaggcacagaagggaagaaacacacattcttgcagatgcttgaatttgtcatgtccaaggctaaaaatgtcacagggtctgtagattttttagtttctgtttttgaaaaaatgcagagaactaaaacagacagagaaatatacttgatgagcatgaaagtgaaaatgatgctttactttatagagcacacattcaaacatgtagcacagagtgatccatcagaagctatctctataagtggagacaacaaaataagggcactttctacattatctttggacacaatcacatcttacaatgatattttgaacaaaaattcaaagaagtcaagattggctttcttatctgccgatcagtcgaaatggtcagcatcagaccttacctataaatatgttttagctatcatattaaatccaattttaactactggtgaagccagcttgatgatagaatgcattttaatgtatgttaaattgaaaaaggtttgtataccaacggatatttttttgaacctaagaaaagctcaaggaacttttgggcaaaatgaaactgccataggacttttgactaaaggtttgacgacaaacacatacccggttagcatgaactggttgcaaggcaatttaaattatctgtcgtctgtttatcattcttgtgcaatgaaagcttatcacaagactctagaatgttacaaagactgcgatttccaaactagatggattgtgcactctgatgacaatgcgacatcattgatagccagtggagaggtcgataaaatgctaacagatttttcaagctcatctctgccagaaatgttgtttagaagcattgaagctcatttcaaaagcttttgcataactttgaaccctaaaaagagttatgcttcttcatcagaagtagagtttatatctgaaagaattgtaaatggagcaattattcctctctattgcagacatttagcaaactgttgcacagaatcttcacatataagttattttgatgatttgatgtcactcagtatacatgttacaatgcttttgaggaaaggctgtcccaatgaagtaataccttttgcttatggggctgtgcaagtacaagcattaagcatctattcaatgcttcctggtgaagtgaatgatagcattaggatttttaaaaaacttggagtaagtttaaaatcaaacgagattcccacaaacatggggggctggttaacttctcctatagagccattgtctatattaggtccatcatcaaatgatcaaattatctattacaatgtgataagagattttttgaacaaaaaaagtttagaagaggtcaaagatagtgtctcttcttctagttatctacagatgagattcagagagttaaaagaaaagtatgaaagaggaactctggaagaaaaagacaaaaagatgatatttcttactaatttgtttgagaaagcatcagtgtccgaagattcagacgttctaacaatcgggatgaaatttcaaaccatgttaactcagatcataaaattgcctaatttcataaatgaaaatgctttaaataagatgtcaagttataaggatttctcaaaactttaccctaatctaaaaaagaatgaagatctatataagagtactaagaacttgaagatagacgaggatgctgttttagaggaagatgagttatatgagaagattgcgtctagcttagaaatggagtctgtccatgacataatgataaaaaatcctgaaacaattctgatagcaccattgaatgatagggattttttacttagtcagctgtttatgtacacaagcccttccaaaaggaatcaattatcgaaccaatctacagagaaacttgctttagatagggtattaaggtcaaaagctagaacatttgtggacatttcttccactgtgaagatgacttatgaagaaaacatggaaaagaaaatcttagaaatgctaaaatttgatttagattcatattgttcatttaaaacatgtgtaaatctagtaatcaaagatgttaatttcagcatgctgattccaatattggattctgcatacccttgtgaatctagaaaaagagataattacaatttcaggtggtttcagactgagaaatggatacctgttgttgaaggctctccgggactagtagtgatgcatgctgtttatggatcaaattatatagaaaatttaggtttaaaaaacatccctctaacagatgatagcattaatgttttaacaagcacatttggaacaggtctaatcatagaagatgtgaaatctctagttaaaggtaaagacagctttgaaacagaggcttttagtaattctaatgaatgtcaaagattggtgaaagcatgcaactatatgatagcagcacaaaacaggcttttagcaattaacacatgcttcactaggaaaagcttccctttctattccaagttcaatctagggagaggatttatttcaaacacactagctctcctatccaccatctacagcaaagaagaatcctatcattttgtttctacagctagttataaactagacaaaaccatcagaactgtgataagcgctcagcaagatatgaacttggaaaaaatactggacactgctgtatacatatcagataaattgcagtcacttttcccaacaattactagagaagatatagctttgatattacaaaatgtgtgccttgacagcaagcctatatggcagagtctagaagacaaaatgaaaaggattaacaattcaacagctagtggcttcacagtatcaaatgtgatcctatcacataacagtgaattgaacacaatccagaaacaaattgtctggatgtggaacatgggtttgtgttctcatagaacattagattttgttatcagatatattcgaagaagtgatgtaagatatgtgaaaactgaagaacaagacgaatcacgaaattatgtctctggaacaatgtacaaaattgggatcatgacaagaagctgttatgttcaattgatagcttctgatcatgatgtagcagtttctttgagaacaccattcgagatattgaatgaaagagagtatctttttgatacatacagagagagtatagagaaattgctgcagaaatttatgtttgataaagtgaacataataaagtcaaaacaaccacagattgtcttcttagaaccaggagatgcctgcattagaatgactacagataacaaaatgattgtcaaggttaatgccacatcaagacaaataagactagagaatgtaaaattagttgtgaagataaaatatgaaaatgtgaactctgatgtatgggatattatagaaggccaaaagtctctagtcttgaggcttcctgaagtaggggaatgtttctctgatatgtacaaaactgcagactctgaaaccgaaacaatcaaaaccataaaaaacaggctcatgacctctttaactttcatagaagcctttggaaacttatcacagcagatcaaagagattgtatatgatgatatcagagaaacaatggatgaattcttaatgaacatccgggatacctgcttagaaggtttggaaaactgcaaaagtgtagaagaatatgataattatctcgatgaagatggttttaatgacacagtggaactattcgaaaacttgctaagaacacatgataactttgaagatgagtatagtcctctgttttcagagattgttgataaagcaaaacagtacactagagatttagaaggtttcaaagaaatactgctcatgcttaaatattccctgataaatgatgcatcgggatttaaaagctatagagccactggaatgcatgctgttgaactaatggcaaaaaaacacatagaaataggagaattcaacttgttaggaatgatccaactgattaaagcttgtgaaacatgccacaacaatgactctatattaaacttagcaagtttgaggaatgttcttagcaggacatatgccacattcgggaggagaataggattgaaccatgatctggacttgcaaaacaatttaatggaaaaaagttgtgatttcaagacgctggttttaccagacataaaattatcagaactatctagggagatactgaaagaaaatgggtttgttatatctggagagaatctaaaaatggataggtctgatgaagaatttgagggtcttgctagttttaatgtgttgaggctagatgaggaagaaatgtatgaaggtttgatcaaagaaatgaaaattaaaaggaaaaagaaagggtttttattcccggcaaatacacttctactaagtgagttgataaaattcttgattggagggataaagggaaccagttttgatatagagacattgttgcggaacagttttagaccagacatattttcgaccgacagattgggtaggttgagttctagtgtacctgcactcagagtttatgcaactgtttatatggaatataagaatgcaaattgtcccttaaatgagatagctgacagcttggaaggttatctaaaactgacaaaaagcaagcctaaggagcatttcttgcatggaagagtcaagaaagccttgatacaattaagagatgaacaatcacgaactaaaaaattagaggtttataaagatatcgcaaatttcctttccagacatccactatgtttgtcagagaaaaccttgtatggaagatacacctactctgatattaatgattatatcatgcaaacaagagagattattttgagtaaaataagtgagttggatgaggttgttgaaacagatgaggacaatttcttgcttagttatctaagaggagaagaagatgcctttgatgaagatgaaattgatgaagaagaagatacagattaa

SEQ ID NO: 221 - DNA, 8669 bp, Watermelon bud necrosis orthotospovirus
  source 1..8669: mol_type = other DNA
atgaacattcaaactataaacagttttctagatgcttcaggcgaaaccactgcatatctgcagagaataaaagatgaaatcatgttaatgtcaaatgttatagaacaaggttattctgaaggtaaaggtgtaattgaatctggattgagttctataatgtctatgaattatattctagacaagattgaagacatgaaatcaaaataccatcagagctcctcttctattgatcaaagagaaatggaaacagaaatctatttatttctcgataaatataaagaactagagttgatgaggcatgatctctttggtgttcttgctggaagaagattacattttgttccaaaacacagatctgatgtttttatgaaagattgtcttatgtcttatatagagttctgcagtgcttcagtgtccatttcgaacaaaatagacaaccttgatagtctaaaagaaaaattgatcttccagcacctaacaccagacaattacacaatatacaaagaaaccaaaggtgagaaagcatgtttgatgatatatgattggaaagtgtctgtagatgctgtgtctgaaggcaagacgtcagaaaactattacacaagtgtttggaaaacttttaaagatatcactatagacgaagaaccttttttagagagacacccaatattcataaccattgttgtgttgaatcctagcggtaatatgccaattgtggcaacaacttgccgggtcgtccaggagttcaggaactcaccatataaaaccttcaatgaccgcaaacgagctgctgaagcagcaaagctaatatcagttaattctctaggtcagcttataggtctgggtgctgactgttttaggcggttttactcagaaacacaatcgtttaagaactctctcttatctaaggttggcaagtatatgaacaggtcatcggaggttttctttagccactggtcatgtgaatacaggaaaactaatttatcaaacaatcaaattagtcaagatattattgatttgatcaattccttgcctaacgatgtggtggggaaggagatccttgttcattttctttttgggaattatttatacttcaaagagactatgagtgaacttcatctcaaagatagatttgaggggtacagatcacactgcaaaatgatgagaattcgtcctttggaaaatgaagaaaaacttaaagactatcttgatagaaatgagcatatttttgagagtttgtatgaaacacatctcaaaaagataaaatcagatgtgctactcagaaaatctaaagaaatagagatagaaagcatagagcgagctttcaacattaatgcagaggagtaccaaaaagagtatcctggatgtttcacaaatgatcttcaagaaactaaaacaaacttttcaatctgctggtcaccaatgacagaagaactaaagatgaatgatcttaattataataatgcaataatacaatctttcagagatgctttgagtgaacagccaaagcttattcaccataaatcatatggtggggctaaagtagacacttatttttccacaactctttttaatttagttagagcttgtctagtagatctaagtacagatacaacgggacattcaaaggctaccttagaagacgtagtggatattaaagatggcagcatccaggtaaaaagaactgaagcctcacagagatggagagaaatagggaatgtcaagactagaaatgggaatgagttcacgttatcaccgcaagcagacactgaagcaagaaagaattttttcagaggtttaaacttgatgtatgttgacatggggaagaaaaagaagatagatataaagaatgaattaaaaagcaagatccaggagtcaatggctcagcaaaagaatgaaaacatggatggcccgagcggggagtatgatgtgtcaaaagccaatatacctcaccaaacgagcctcaaagggatcacacataacaaaaagctaatcagacatgataacccagatgttaaatatcattgtgagtcaatgattgaatctatgtacgtccttcatggtatggacgaaagaaaagataaaaatagtaaaataaattctgtctacaatgaatattgctcaaatccttcttcactatttactaaaggcaatttgatagaaactgaaatgacaattgcaaagaatatccatgaagtagctaaggaactttcaatttacacatatagtgaagacatgatgcagatggcaaaaggtttgatggtggctgacaggtttatgaagaaaacagacttcaagatcttaacttgtgccaatacaagcatgatatgcctagcattcaaaggtgacggcataaacacagggaagtcaggtgtgccttacatcaccatacacaaggtagacaagagcatccaaccacactttgtttctttatacacaaaagaactaatagtgtcttttaaatcagagaattattttattaatatcatgaggccacaaaggctaaatcaggtgcgacttctcagcctgttcaaagctcctagtaaagtccctatcctcttttcacaatattccttattgagtacagagataaaaaaatggttgaatcagcaatccatagatgttttcacttgccctgaaaataagatccagtatctgcaaaagatattattctcctctgtgatcattggcactgtgaccaaactcagcagaatgggaatttttgatttcatgaggtatgcacggtttctaccactgtctgattattccaatataaaggaatatatagctgagaagtttgacccagatataacaaatgttattgattgtttttttgtttctggaattaagaatcttcttctgaaaatggaaggtataaatttaagtaatagtataaaacctctgactatagatcaagaaaatgatatgtctggaggtatatcagatttagacatcatatgccctatcacaggatctacactaaagactatagagtgtctgtataacaatgtctatcttgcaatttacatgatgccgaaatctctccacactcatgtacacaatctcacaacacttctgagtgtcccggctgaatgggaaattaagtttagagaaaaaatgggctttatgataggagatgaaattaaaccaaagaaagaaatgttcaatgattctggtccattctcaattaatggagtgctcaatgtgaaaactttgtttgattattacaagaaaaatattacaaatgttggtgcttgtagatcaaatatagaagaaaaagaggattttttgtctgctccatataaaataaaaactttaacatcatctaaaaaatgctcaaaggcagatatcataaaaagtacagagatagttgctgctttaaaatcatcatatggaaaacagccagatgatataaagggttcagacctttatatactgaagggagttctgaagtgttttgatgaagatagagattcattaaccaacttcttggaggtagaaggcttagaagagtcaaaatatttacatttttttaccaacatgatgtcaggtgataataaaatattgatgaaaactaaccaagacaaattttattataaaagtcatcctttgacagtggagacatttatgaaagttaggtatggttatttcaagacaaccactgttttaaaatcaaaaaaagtaagtgaggaattgtatgatttaatcaaagagttcaacaagataacagaggttgacctggaagctttggaaaagctaggtcgtggactaaaaggcaatcgagtcacatttatacaattattggaatttattttgatgaaatccagaaccaatgctgggaacacagatttcttggtatcaatatttgaaaagatgcagagaacaaagatggatagagagatttatcttatgagcatgaaaacaaaaatgatgttgtattttatagagcatacatacaagcatgtggctcaatctgatccttctgaagccatctcgatctctggagactacaaaattaaaaatttggcatctttatcatatgatactataactaattacaacacagctcttcagaaaaatcttgaatgcaaaatggcttttttatctgcagatcaatcaaaatggtctgcatcagatctaacctataaatacatcttggctgttattatgaatcctcttttaaccacaggagaaataaacctgatgtgtgagtgcataatgatgtatgtaaagttgaagagagtttgtattcctaccgacatctttctaaacctaaaaagagggcaaactgaatatggatcttatggaactgcactgtctgttttaacagataacttagaaacaaatacatttcctgtatccatgaactggctccaagggaatttgaattatctttcgtcagtgtaccactcttgtgcaatgatgggctatgaaaaagctatgaaaaagatgggaaactatgatttcactataagatggatggtgcattcagatgataatgctacttctatggtggttagaggggatataaaagaacttcttgccgagtttaattgcaccagtctgtcagaactgcttttccggagtatacaatcacattttaaaagttattgcataacattaaatccaaaaaagagctatgcctcagaatcagaggtagaatttatatctgaacgaataattaatggtgctgtcatacccttgtattgtagacacttagctaattgtagcacggaaagttcccataatagctattttggtgatctgatgtcactttctatacatataacaatgctcttaagaaaaggatgtcctaatgagctgataccatttgcttatgctgcaatacaaatccaatttctcagcatttactcaatgcttcctggggaagaaaatgatatatcaactattgtcaaagaaattgattttcccttatcaaaaagagaaatcccgatatgtgctggtggttggatgtatgcacctatagaattattgtctatcttaggtccttcatcaaacgatcaattgatttactacaaaatcatcctagatttttttaacctaaaagattttagtagtcttaagaaaagcgtcaactctttaggctacattgatttaagaatcaatgaattgttcaaaagaataaaatatcaaaaaataacaaatgcggataaaaaaatgatatgcatggttaacttatttaaaacaagtttgatgtctgaagactgtgacagtttaaatgtaggaatgaagttccaatccatgatcacacaaattataaaactacctagttttgttagtgaaggctcactgttgaagaactcaagtttccaagacttctgtaagctattccccaatttgaagaaaaacactgacatactcaacgcattaaaacctgttaacttggatgaaagaagccttgaagagttaaatgagagcaaatttttatcacaaatccagctagaagagttgagtaggcacatggcatctcatccagaatcgtttttgatagcaccaatgaatgacaaagattacattttgaccaatctctatacgtatagcagtgtaagcaaaaggaatcaaatgttaaatcaatcaactgagaaattggcattggatagaattttaaggtctaaagctaaaaccttcttagatcccaattcaaaagagatggtttcatataaagaaaatatgtctatgaaaatgagagagataatgagctatgctgggaatgacttcaaaattattaatactatatccagccttatggtgagagacatgaattttgaaatggtcgtctctttaatggagaacactgttgctaatgcttctattcctaaagcgaattataattttagatggttcataactgaaaaagtaccaagtgtcattgagggatcccccggtttaattgttatgtcagctgtttatggcatggattatttgatagagctaggactcaaaaaactccctttgacagaaacctctatctctatactgcatgacatctttggtaacagaaaaacatttgatgatgttaaagagtgtatacagaatgttaaaaagcaatacaagacagaagaatttcaaaatgcagatgttctaaagagatatgtattaagtataaattacatgatccagtcccaaaacaagcttctgtctatcaacacatgtttctccaggaagaatttccctttctattcaaaatataatctaggtaagacgttcataaccaatactttagctatatggagcactatatacagccgattgacaaatataaacttttacaccaatctgaattttgtaattgacaggagttctaggttgattatctcattgcaaagagacatgaatctagaaaaactaattgattgctgtgcctatgtttctgacagattgcaaagcttatttcccgatatgaccgtagagtctatccggcaagttttgtgcaggctaaattttaatggggtagatcttatgaagaaaatgaaatctgaaatagctgaggtaaaaagagccataaacaacataaagacatccactcatgtaactctctcattcaggccacaaatgatagcaatgagcaaacatgcagcatggttatacaattttggatatattaatgagaaagagttcaaatttgtcatagatcagatcagacaaagcgaagtccattatattaaaacagatgagcaagatgtcagaggttactatgtttcaggtcatacatacaaaatagggatcaaaacccagcataactatggacagcttgctatgtcaaaccaagatgtgtcaatccatctccactcaccgtatgaatacaagagagaagatgatgggaaaatatgggatgttcatgttagatctgtatataaattgcttcaaaagctcttaatggacaagcaaagtgtaattaaagcatttttaaatattagaacagaactaatgcccaatcaattttgtattcatgagagttcaaataaaactctattgatattgatcaatgatacaacccgaccaatctcattagagagaatcaaattcaaaggtgatataaaatacattccctcctctgactttgcctgggacatgatgagcaatcagtctaaatacagattgcgacaagcagaaacaggagaatgttacacagaattatacaaactaatagacaacaatgataatttgatgaacactattttaacaaatttaaagaaaagcttagaatatgggaatgaaatggagaaccttatagagcaatcaatccaagggatagatgatgcagatactattgaatatatccaagagtctgttgaccaaatccacaaattagccatagaaggtttagaaacatgtcagacatcagatgaatttgaaaactacctaaaaagagttgattttcaatctacagttgatttccataaagatcttttagagcagattgttgaggaaaaatatggttcagcagaaagactagatgttgctgtagagaagctaaccaaatggacaaacagtttatcaacatttaaagatgtgtgcacaatgttaaagttctccatggtcaatgattctaagggaattaaaacatataaagctaatggagctgatttccactcattatcagcaagtgaagtcatgacttcacaaggatttgatttgttcgaattactgaagttaataaaggcctgtgaagcttgccacaccagcaattcagtattgaacttaattgcttttaaaaatatcaaaaacaaaaccttcatcccagggtttaagagacacttgcccaatacagttcattttgactatgaaatgaaactaaataatgaagtgatgaacaaattctatgagtataaaacaatctcactacaagatataaaagtttctgatagagtaaagagggtccttgaaacaaatgggttcagtatcacaggccacaatttgaagttagaagaaacaaacttagaattgaaccccgtggagattatagatgactcttccacttatgatcaggttgccaagcaaatgaggttaacaaagaaaaagagctcatatcttatacctgctaacactctattgttaggagaactaatgaagttcttgatgctgtgcatcaaaggagaagaacatgatataatgaaacttttgagaagtcattttgcaatgcagcctgtaagagaaaatagattgctttgtatccaagatgctgttatgacatgcaggataagtggttatatccaaagacactttctcaatgacaagaaagaaatcgtactgttaggtgtagctgacagcttagagaacttcatttccttagcaactccaaactatgcaacacaggagccatttaaagcagaggctttgataaaaaaagccctggcagaagtgtatgattccggtaaatataagatactaaaaaatataagaaattatatagttgatgatgtagaatttcttacagaaaagtgtttatattcaaacataactaatgaggagataagcaacatgatatttaatgcagttagcaaaattgatctggaattatccaatttaaagccaaagaagagaaagaaaagactagacttacatgacgttttcaatggattcttgggatcagatgctactacttcggaacaacaataaaaaggaggtaatctatgggcgggaggaaagga

SEQ ID NO: 222 - DNA, 5535 bp, Turnip yellow mosaic virus
  source 1..5535: mol_type = other DNA
atggccttccaattagcattggacgcccttgcacccacgactcacagagatccctctctgcacccgattctcgaatccacagtggattcaattcgctcctcgatacagacctacccatggtccattccgaaggaacttctacccctactcaactcctacggcatcccaacatctggtttgggaacctcccaccacccccacgccgcccacaagacaatcgagacttttctcctttgcacccactggtctttccaggccaccactcccagctccgtcatgttcatgaaacccagcaagttcaacaaacttgcccaggtaaactcaaactttcgggagctgaagaactaccgcctgcaccccaacgacagcactcgttaccccttcacatcaccagaccttcccgttttccccaccattttcatgcacgacgccctgatgtattaccatccgtcccagatcatggacctgttcttncggaaaccaaacctcgaacgtctgtacgccagcctcgtagtgccacccgaggcccatctttccgaccaatccttctacccaaagttgtacacgtacacgacgacccgccacactcttcactacgtcccagagggtcacgaagccggcagctacaaccaaccgtccgacgcccactcttggctccgaatcaattccattcgcctcggcaaccaccacctctcagtgacgatcctggaatcctggggccccgtccactcgctcctcattcaacgagggacccccccccccgacccatcactccaggcccctccaacactcatgncctcagacctctttcggtcttaccaagancctcgcctcgacgtggtctccttccgaatccccgacgccatcgaacttccacaggccacattcctccaacaaccacttcgagaccgactggtcccccgagccgtctacaacgccctgttcacctataccagagcagtccgcacactccgaacttcagacccagcagcattcgtaaggatgcactcctccaaaccggaccacgattgggtcacctcgaacgcctgggacaacctgcaaaccttcgcacttctgaacgttcccctccgaccaaacgtcgtctaccacgttcttcagagcccaatcgcctccctaagcctttacctgaggcaacattggcgccgtcttaccgccaccgccgtccctatcctctccttcctaaccctcctgcagcgcttccttccattgcctatacctctagcagaggtaaaatccatcacagccttccgaagggagctttaccgaaagaaggagccccaccaccccctcgacgtcttccatctccagcaccgcgtccgcaactaccactccgcgatctcggccgtacgcccggcttccccaccccaccaaaaactcccacacgcactccagaaagccgcattactgcttctccgaccgatatcgcccctcttgacagcgaccccgttctttcggtccgaacagaagtccatgctcccgaacgccgaactttcatggaccctgaagcgcttcgctctgccctggcaagcctccctagtcctcctcgctctgtcggaatcatccatactgctccacaaactgttctccccgccaaccctccaagcccaacacgacacctaccaccgacatctccaccctggatcctacagtctccagtgggagaggacgccattgtcgattccgaggacgacagcatttcttcctttcactcccacgacttcgacagcccctccggaccgctccgaagccagtctccctcccgctttcgcctccaccttcgttccccgtccacctccagcggcatcgagccctggagcccagcctcctacgactacggcagcgcccccgacaccgattgaacccacccaacgcacccatcaaaattctgacctcgcgctcgaaagttcaacctcaaccgaacctcccccaccccccatccgatcccccgacangacgccctccgcccccgtccttttcccagaaatcaactcacctcgtcgttttcccccccaacttcccgccacgcccgatctcgaacccgcccacactccaccccctctttccatcccgcaccaagatccgactgactcagcggaccccctcatgggctcccaccttttgcaccattcactgcctgcaccccccacccacccccttccatcttcacagctgttacccgcacctttaacgaacgaccccactgcgatcggcccggtgctcccctttgaagaactccacccacgcaggtaccctgaaaacaccgccactttcctcacgaggctccgttcactcccatcaaaccatcttccacaacccaccttgaattgtcttctctccgctgtctccgaccaaaccaaggtttccgaggagcacctctgggagtccctacagacaattctcccagacagccaactcagcaatgaagagaccaacactctcgggctttcaactgaacacctcactgcgttggcccacctttacaacttccaggcaaccgtttactccgatcgcggccccatcctcttcggcccctccgacaccatcaagaggatagacatcacccacaccaccggaccgccatcccacttttcacccggcaaaagactcctaggcagccaaccctccgctaagggccatccctccgacccactcatcagagccatgaagtctttcaaagtatccggcaactaccttcccttctctgaggcccacaaccatcccacctccatctcacacgccaagaacttgatttcaaacatgaagaatggtttcgacggcgtcctctccctcctcgacgtctccacgggccaacgaaccggacccncccccaaagaacggatcatccagatagaccactaccttgacaccaaccccggcaaaaccactcctgtggtgcatttcgctggcttcgctggctgtgggaagacatatccgatccaacagctcctcaaaaccaaactgttcaaagacttccgggtctcttgccctaccacagaactcagaaccgaatggaagacagcgatggaactccacggctcccagtcatggcgctttaacacttgggagtcttccattctcaagtcatccagaatcctggtcattgatgagatctacaaaatgccaagagggtacctcgacctttccatcctcgccgaccccgccctcgagctcgtcataattctcggcgatcctctncagggcgagtaccactcccaatcgaaagactcatccaaccaccgccttccctctgaaactctcaggctgctaccatacatcgacatgtactgctggtggagttaccgcattcctcaatgcatcgcccgactcttccaaattcacagcttcaatgcctggcaaggagttatcgggtccgtttccactccccatgatcaatcccccgtcctcaccaacagtcatgcctcatctcttaccttcaacagcctgggatatcgctcctgcacgatcagctctagccaaggcctcacattctgcgaccccgccataatcgtcctggacaactacaccaagtggctctcctcggctaacggcctcgtcgccctcactcgatccagatcaggcgtccaattcatgngcccctcttcctacgtcgggggaaccaacggctcttccgccatgttttccgacgccttcaacaacagcctcatcatcatggatcgctacttcccatccctgttcccgcaactcaagctcatcacctcccccctcacaactcgcggccccaaactcaacggggccacccccagcgcatcccccacccaccgttcgccaaacttccaccttcccccacacattccgctctcctatgatcgtgattttgttacggtgaacccaactctccccgaccaaggacccgaaacaagactcgacacccactttctcccaccgtctcggctccctctccatttcgatctcccaccggctatcaccccacccccggtttccacaagcgtcgacccgccacaagcgaaagctagccccgtctacccaggcgagttcttcgattctctggcggcgttcttcttaccagcacacgacccatcaacaagggaaatactccacaaagatcaatctagcaaccagttcccctggttcgaccgacccttcagcctgtcctgccagccctcaagtctgatttccgccaagcatgcacccaaccatgatccgacccttctaccggcctccatcaacaaacgcttgcgattcagacccagtgactcaccgcaccaaatcaccgcggacgacgtggtcctaggcctgcaactctttcactctctttgtcgcgcctactcacgtcaacccaacagcaccgttccattcaaccctgaacttttcgcagaatgcatctctctgaatgagtacgcacagctcagttccaaaacccaatccaccatagtggccaacgcttcacgctccgacccagactggcgacacaccaccgtcaagatcttcgcgaaagcccaacacaaagtcaacgacggctccatcttcggctcgtggaaagcctgccagaccctcgcactcatgcacgactacgtgattctggttcttggacccgtcaagaaataccagagaatcttcgacaacgctgaccggccacctaacatctactcacactgcggcaagacacccaaccaacttcgagattggtgccaggaacatctcactcattccacccccaaaatcgcaaacgactacaccgctttcgaccagtcccagcatggagaatccgtggtccttgaagccctcaaaatgaagagactgaacattccnagccatctgattcagctccacgtccacctcaagaccaacgtctccacccagttcggccccctcacatgcatgcgcctaaccggggaacccggaacttacgacgacaacactgactataacctcgcagtcatctactcccagtatgacgtcggttcctgccccatcatggtttctggcgacgactcactcatagaccacccccttcccactcgccacgactggccatccgttctcaaacgcctccacctccgcttcaaacttgaactcacctctcaccccctcttctgtggctactacgtcggtccagccggctgcatccgcaaccccctggcccttttctgcaagctcatgatcgccgtggacgacgacgccctcgacgaccgacgactcagctacctcaccgagttcaccaccggacacctccttggcgaatcactgtggcacctcctccctgaaacccatgttcagtatcagtcagcctgctttgacttcttctgcaggcggtgcccaagacacgagaaaatgctcctcgacgactccacacccgcactcagcctcctcgaacgaatcacttcttcgccgaggtggctcaccaaaaatgccatgtacctcctccctgccaagctacgactggccatcacctctctatctcaaacgcagtccttcccagaatccatcgaggtttcccacgctgagtctgaattgcttcactacgtccaatag

SEQ ID NO: 223 - protein, 415 aa, Citrus tristeza virus
VVRSQAIPPRKASLQENLLSYESRNYNFIKTERFVGPSEFGRAMAAAVIERCFKMEEMAKIRCDIISLTEANILKWLDKRTPCQIKAVHGELKLPFSVEEQISNFKLMVKRDAKVKLDDSSLSKHPAAQNIMFHKKFINAIFSPCFDEFKNRVLSSLNDNIVFFTEMTNAGLAEIIRRIIGDDDNLFVGEVDFSKFDKSQDLFIKEYERTLYSEFGFDTELLDVWMEGEYRARATTLDGQLSFSVDGQRRSGGSNTWIGNSLVTLGILSLYYDVSKFDLLLVSGDDSLIYSSEKISNFSSEICLETGFETKFMSPSVPYFCSKFVVQTGNKTCFVPDPYKLLVKLGAPQNKLTDVELFELFTSFKDMTQDFGDQVVLEKLKLLVEAKYGFASGTTMPALCAIHCVRSNFLSFERL

SEQ ID NO: 224 - protein, 446 aa, Beet yellows virus
TQVFESGADNVVIRDSAPVNKSTDHDPQRVSSIRSQAIPKRKPSLQENLYSYESRNYNFTVCERFSGPQEFGQAMAMVMLERSFDLEKVAKVRSDVIAITEKGVRTWMSKREPSQLRALSSDLQKPLNLEEEITTFKLMVKRDAKVKLDSSCLVKHPPAQNIMFHRKAVNAIFSPCFDEFKNRVITCTNSNIVFFTEMTNSTLASIAKEMLGSEHVYNVGEIDFSKFDKSQDAFIKSFERTLYSAFGFDEDLLDVWMQGEYTSNATTLDGQLSFSVDNQRKSGASNTWIGNSIETLGILSMFYYTNRFKALFVSGDDSLIFSESPIRNSADAMCTELGFETKFLTPSVPYFCSKFFVMTGHDVFFVPDPYKLLVKLGASKDEVDDEFLFEVFTSFRDLTKDLVDERVIELLTHLVHSKYGYESGDTYAALCAIHCIRSNFSSFKKL

SEQ ID NO: 225 - protein, 295 aa, Potato virus X
GTVRQSPDFDENKIMVFLKSQWVTKVEKLGLPKIKPGQTIAAFYQQTVMLFGTMARYMRWFRQAFQPKEVFINCETTPEDMSVWALNNWNFSRPSLANDYTAFDQSQDGAMLQFEVLKAKHHCIPEEIIQAYIDIKTNAQIFLGTLSIMRLTGEGPTFDANTECNIAYTHTKFDIPAGTAQVYAGDDSALDCVPEVKHSFHRLEDKLLLKSKPVITQQKKGSWPEFCGWLITPKGVMKDPIKLHVSLKLAEAKGELKKCQDSYEIDLSYAYDHKDSLHDLFDEKQCQAHTLTCRT

SEQ ID NO: 226 - protein, 70 aa, Potato virus A
GQLGVWNGSLKAELRPKEKVDLNKTRTFTAAPIETLLGGKVCVDDFNNMFYSLHLKAPWSVGMTKFYGTW

SEQ ID NO: 227 - protein, 236 aa, Potato virus Y
GLLGIWNGSLKAELRCKEKILANKTRTFTAAPLDTLLGGKVCVDDFNNQFYSKNIECCWTVGMTKFYGGWDKLLRRLPENWVYCDADGSQFDSSLTPYLINAVLTIRSTYMEDWDVGLQMLRNLYTEIVYTPISTPDGTIVKKFRGNNSGQPSTVVDNSLMVVLAMHYALIKECVEFEEIDSTCVFFVNGDDLLIAVNPEKESILDRMSQHFSDLGLNYDFSSRTRRKEELWFMSH

SEQ ID NO: 228 - protein, 236 aa, Pepper mottle virus
GKLGVWEWALKAELRSKEKIEANKTRTFTAAPIDTLLGGKVCVDDLNNQFYSKNIECCWTVGMTKFYGGWDKLLTALPAGWIYCDADGSQFDSSLTPYLINAVLTIRYAFMEDWDIGYKMLQNLYTEIIYTPISTPDGTIVKKFRGNNSGQPSTVVDNSLMVVLAMHYAFVREGIAFEEIDSICKFFVNGDDLLIAVNPERESLLDTLSNHFSDLGLNYDFSSRTRNKSELWFMSH

SEQ ID NO: 229 - protein, 235 aa, Bean yellow mosaic virus
GRMGVWNGSLKAELRPQEKVLANKTRSFTAAPIDTLLAGKVCVDDFNNKFYSLHLKIPSTVGITKFYGGWDRLLNSLPDGWVYCDADGSQFDSSLTPYLLNAVLEMRLRLMEEWDLGEQMLKNLYTEIVYTPILTPDGTVVKKFKGNNSGQPSTVVDNTLMVIMAVYYAAEKLGIKGNLEDTLVFFANGDDLLIAIKPECESYLDKFEGLFSELGLKYDFSSRTKNKGDLWFMSH

SEQ ID NO: 230 - protein, 188 aa, Wheat stripe mosaic virus
RVYRFQLKDIEKPFKDAIVDLGKAGQGILAWSKEAHVMFMLAFRVLNDLLLKSLKPWVVYDNSMSEEQFLDKVNAAMTVTPDCAVNSVIDATACDSGQNGFTQLIERQIYARLGASELLLDWYFSFREKYILQAEHVRAPMENVKTSGEPGTLLGNSILMAAILNALVRGSGPFVLVMKGDDGFKRQA

SEQ ID NO: 231 - protein, 401 aa, Rice yellow mottle virus
KQSLTSLILQAGRFNRTVCPPGLAQAVQSLQERYPKVPPRRCLRDEWRFDDIFDEVERILCETGEVNSASSPGVPLAGLANSNGEVRGLARDLVCLAVVERLNALASVDPRQHNWTPRELVEKGLCDPVRLFVKNEPHPRRKLLERRFRLISSVSLVDQLVERMLFGPQNNTEISTWWQWPSKPGMGLLTPEQIRLVWDDVFQKHQAHPAAEADISGFDWSVQDWELWSDLAIRINRGNFQGNLRRAAISRYYCFMNSVFQLSDGTLIQQELPGLMKSGSYCTSSTNSRIRCLMAELIGSPWCIAMGDDSVEGWIEGAQSKYAALGHTCKEYYPCKTRGRELLEFNFCSHLIRRGHAELTSWPKALFRFLSSKHEDFEDLWVELHTCGVWSRIERYLRGIG

SEQ ID NO: 232 - protein, 235 aa, Maize dwarf mosaic virus
GKLGIWNGSLKAEIRPIEKTEANKTRTFTAAPLETLLAGKVCVDDFNNQFYAHHLNGPWTVGITKFYGGWNRLLEKLPDGWIYCDADGSQLDSSLTPYLINAVLNIRLQFMEPWNIGEQMLKNLYTEIVFTPIATPDGSVIKKFKGNNSGQPSTVVGNTLMVIIAFNYTLLSCGVDLEKADDVCRMYANGDDLLLAVNPTHVDILNEFGKHFAALGLNFDFESRTRDKSELWFMS

SEQ ID NO: 233 - protein, 167 aa, Zucchini yellow mosaic virus
DFFKYNKPVTVNQLDHDKFLEAVDGVIRMMCDFEFNECRFITDPEEIYNSLNMKAAIGAQYRGKKKEYFEGLDDFDRERLLFQSCERLFNGYKGLWNGSLKAELRPLEKVRANKTRTFTAAPIDTLLGAKVCVDDFNNEFYSKNLKCPWTVGMTKFYGGWDRLMRSL

SEQ ID NO: 234 - protein, 236 aa, Watermelon mosaic virus
GEKGIWNGSLKAELRPIEKVQANKTRTFTAAPIDTLLGAKVCVDDFNNQFYSFNLKCPWTVGMTKFYGGWDKLMRSLPDGWTYCHADGSQFDSSLTPLLLNAVLSIRCCFMEDWWVGKEMLENLYAEIVYTPILAPDGTIFKKFRGNNSGQPSTVVDNTLMVVIAMYYSCCKQGWSEEDIEERLVFFANGDDIILAVRDEDVWLYDTLSASFAELGLNYNFDERTKKREELWFMSH

SEQ ID NO: 235 - protein, 235 aa, Sugarcane mosaic virus
GNLGIWNGSLKAEIRPIEKTTLNKTRTFTAAPLETLLGGKVCVDDFNNQFYSHHLQGPWTVGITKFYGGWNRLLEKLPDGWIYCDADGSQFDSSLTPYLINAVVKIRLQFMEEWDLGERMLQNLYTEIVYTPIATPDGSVIKKFKGNNSGQPSTVVDNTLMVILAFNYAMLSSGIREDEIDNCCKMFANGDDLLLAVHPDFEYILDGFQNHFSNLGLNFDFTSRTKEKSDLWFMS

SEQ ID NO: 236 - protein, 1616 aa, Tobacco mosaic virus
MAYTQTATTSALLDTVRGNNSLVNDLAKRRLYDTAVEEFNARDRRPKVNFSKVISEEQTLIATRAYPEFQITFYNTQNAVHSLAGGLRSLELEYLMMQIPYGSLTYDIGGNFASHLFKGRAYVHCCMPNLDVRDIMRHEGQKDSIELYLSRLERGGKTVPNFQKEAFDRYAEIPEDAVCHNTFQTMRHQPMQQSGRVYAIALHSIYDIPADEFGAALLRKNVHTCYAAFHFSENLLLEDSYVNLDEINACFSRDGDKLTFSFASESTLNYCHSYSNILKYVCKTYFPASNREVYMKEFLVTRVNTWFCKFSRIDTFLLYKGVAHKSVDSEQFYTAMEDAWHYKKTLAMCNSERILLEDSSSVNYWFPKMRDMVIVPLFDISLETSKRTRKEVLVSKDFVFTVLNHIRTYQAKALTYANVLSFVESIRSRVIINGVTARSEWDVDKSLLQSLSMTFYLHTKLAVLKDDLLISKFSLGSKTVCQHVWDEISLAFGNAFPSVKERLLNRKLIRVAGDALEIRVPDLYVTFHDRLVTEYKASVDMPALDIRKKMEETEVMYNALSELSVLRESDKFDVDVFSQMCQSLEVDPMTAAKVIVAVMSNESGLTLTFERPTEANVALALQDQEKASEGALVVTSREVEEPSMKGSMARGELQLAGLAGDHPESSYSKNEEIESLEQFHMATADSLIRKQMSSIVYTGPIKVQQMKNFIDSLVASLSAAVSNLVKILKDTAAIDLETRQKFGVLDVASRKWLIKPTAKSHAWGVVETHARKYHVALLEYDEQGVVTCDDWRRVAVSSESVVYSDMAKLRTLRRLLRNGEPHVSSAKVVLVDGVPGCGKTKEILSRVNFDEDLILVPGKQAAEMIRRRANSSGIIVATKDNVKTVDSFMMNFGKSTRCQFKRLFIDEGLMLHTGCVNFLVAMSLCEIAYVYGDTQQIPYINRVSGFPYPAHFAKLEVDEVETRRTTLRCPADVTHYLNRRYEGFVMSTSSVKKSVSQEMVGGAAVINPISKPLHGKILTFTQSDKEALLSRGYSDVHTVHEVQGETYSDVSLVRLTPTPVSIIAGDSPHVLVALSRHTCSLKYYTVVMDPLVSIIRDLEKLSSYLLDMYKVDAGTQXQLQIDSVFKGSNLFVAAPKTGDISDMQFYYDKCLPGNSTMMNNFDAVTMRLTDISLNVKDCILDMSKSVAAPKDQIKPLIPMVRTAAEMPRQTGLLENLVAMIKRNFNAPELSGIIDIENTASLVVDKFFDSYLLKEKRKPNKNVSLFSRESLNRWLEKQEQVTIGQLADFDFVDLPAVDQYRHMIKAQPKQKLDTSIQTEYPALQTIVYHSKKINAIFGPLFSELTRQLLDSVDSSRFLFFTRKTPAQIEDFFGDLDSHVPMDVLELDISKYDKSQNEFHCAVEYEIWRRLGFEDFLGEVWKQGHRKTTLKDYTAGIKTCIWYQRKSGDVTTFIGNTVIIAACLASMLPMEKIIKGAFCGDDSLLYFPKGCEFPDVQHSANLMWNFEAKLFKKQYGYFCGRYVIHHDRGCIVYYDPLKLISKLGAKHIKDWEHLEEFRRSLCDVAVSLNNCAYYTQLDDAVWEVHKTAPPGSFVYKSLVKYLSDKVLFRSLFIDGSSC

SEQ ID NO: 237 - protein, 1616 aa, Tomato mosaic virus
MAYTQTATSSALLETVRGNNTLVNDLAKRRLYDTAVDEFNARDRRPKVNFSKVVSEEQTLIATKAYPEFQITFYNTQNAVHSLAGGLRSLELEYLMMQIPYGSLTYDIGGNFASHLFKGRAYVHCCMPNLDVRDIMRHEGQKDSIELYLSRLERGNKHVPNFQKEAFDRYAEMPNEVVCHDTFQTCRHSQECYTGRVYAIALHSIYDIPADEFGAALLRKNVHVCYAAFHFSENLLLEDSHVNLDEINACFQRDGDRLTFSFASESTLNYSHSYSNILKYVCKTYFPASNREVYMKEFLVTRVNTWFCKFSRIDTFLLYKGVAHKGVDSEQFYKAMEDAWHYKKTLAMCNSERILLEDSSSVNYWFPKMRDMVIVPLFDISLETSKRTRKEVLVSKDFVYTVLNHIRTYQAKALTYSNVLSFVESIRSRVIINGVTARSEWDVDKSLLQSLSMTFFLHTKLAVLKDDLLISKFALGPKTVSQHVWDEISLAFGNAFPSIKERLINRKLIKITENALEIRVPDLYVTFHDRLVSEYKMSVDMPVLDIRKKMEETEEMYNALSELSVLKNSDKFDVDVFSQMCQSLEVDPMTAAKVIVAVMSNESGLTLTFEQPTEANVALALQDSEKASDGALVVTSRDVEEPSIKGSMARGELQLAGLSGDVPESSYTRSEEIESLEQFHMATASSLIHKQMCSIVYTGPLKVQQMKNFIDSLVASLSAAVSNLVKILKDTAAIDLETRQKFGVLDVASKRWLVKPSAKNHAWGVVETHARKYHVALLEHDEFGIITCDNWRRVAVSSESVVYSDMAKLRTLRRLLKDGEPHVSSAKVVLVDGVPGCGKTKEILSRVNFEEDLILVPGRQAAEMIRRRANASGIIVATKDNVRTVDSFLMNYGKGARCQFKRLFIDEGLMLHTGCVNFLVEMSLCDIAYVYGDTQQIPYINRVTGFPYPAHFAKLEVDEVETRRTTLRCPADVTHFLNQRYEGHVMCTSSEKKSVSQEMVSGAASINPVSKPLKGKILTFTQSDKEALLSRGYADVHTVHEVQGETYADVSLVRLTPTPVSIIARDSPHVLVSLSRHTKSLKYYTVVMDPLVSIIRDLERVSSYLLDMYKVDAGTQXQLQVDSVFKNFNLFVAAPKTGDISDMQFYYDKCLPGNSTLLNNYDAVTMKLTDISLNVKDCILDMSKSVAAPKDVKPTLIPMVRTAAEMPRQTGLLENLVAMIKRNFNSPELSGVVDIENTASLVVDKFFDSYLLKEKRKPNKNFSLFSRESLNRWIAKQEQVTIGQLADFDFVDLPAVDQYRHMIKAQPKQKLDLSIQTEYPALQTIVYHSKKINAIFGPLFSELTRQLLDSIDSSRFLFFTRKTPAQIEDFFGDLDSHVPMDVLELDVSKYDKSQNEFHCAVEYEIWRRLGLEDFLAEVWKQGHRKTTLKDYTAGIKTCLWYQRKSGDVTTFIGNTVIIASCLASMLPMEKLIKGAFCGDDSLLYFPKGCEYPDIQQAANLMWNFEAKLFKKQYGYFCGRYVIHHDRGCIVYYDPLKLISKLGAKHIKDWDHLEEFRRSLCDVAESLNNCAYYTQLDDAVGEVHKTAPPGSFVYKSLVKYLSDKVLFRSLFLDGSSC

SEQ ID NO: 238 - protein, 1601 aa, Turnip vein-clearing virus
MAQFQQTIDMQTLQAAAGRNSLVNDLASRRVYDNAVEELNARSRRPKVHFSKAVSTEQTLIATNAYPEFEISFTHTQSAVHSLAGGLRSLELEYLMMQVPFGSLTYDIGGNFSAHLFKGRDYVHCCMPNLDVRDIARHEGHKEAIYSYVNRLKRQQRPVPEYQRAAFNNYAENPHFVHCDKPFQQCELTTAYGTDTYAVALHSIYDIPVEEFGSALLRKNVKTCFAAFHFHENMLLDCDTVTLDEIGATFQKSGDNLSFFFHNESTLNYTHSFSNIIKYVCKTFFPASQRFVYHKEFLVTRVNTWYCKFTRVDTFTLFRGVYHNNVDCEEFYKAMDDAWHYKKTLAMLNAERTIFKDNAALNFWFPKVRDMVIVPLFDASITTGRMSRREIMVNKDFVYTVLNHIKTYQAKALTYANVLSFVESIRSRVIINGVTARSEWDTDKAILGPLAMTFFLITKLGHVQDEIILKKFQKFDRTTNELIWTSLCDALMGVIPSVKETLVRGGFVKVAEQALEIKVPELYCTFADRLVLQYKKAEEFQSCDLSKPLEESEKYYNALSELSVLENLDSFDLEAFKTLCQQKNVDPDMAAKVVVAIMKSELTLPFKKPTEEEISESLKPGEGSCAEHKEVLSLQNDAPFPCVKNLVEGSVPAYGMCPKGGGFDKLDVDIADFHLKSVDAVKKGTMMSAVYTGSIKVQQMKNYIDYLSASLAATVSNLCKVLRDVHGVDPESQEKSGVWDVRRGRWLLKPNAKSHAWGVAEDANHKLVIVLLNWDDGKPVCDETWFRVAVSSDSLIYSDMGKLKTLTSCSPNGEPPEPNAKVILVDGVPGCGKTKEIIEKVNFSEDLILVPGKEASKMIIRRANQAGVIRADKDNVRTVDSFLMHPSRRVFKRLFIDEGLMLHTGCVNFLLLLSQCDVAYVYGDTKQIPFICRVANFPYPAHFAKLVADEKEVRRVTLRCPADVTYFLNKKYDGAVMCTSAVERSVKAEVVRGKGALNPITLPLEGKILTFTQADKFELLEKGYKDVNTVHEVQGETYEKTAIVRLTSTPLEIISSASPHVLVALTRHTTCCKYYTVVLDPMVNVISEMEKLSNFLLDMYRVEAGVQYQLQIDAVFRDSNLFVQTPKSGDWRDMQFYYDALLPGNSTILNEFDAVTMNLRDISLNVKDCRIDFSKSVQLPKEQPIFLKPKIRTAAEMPRTAGLLENLVAMIKRNMNAPDLTGTIDIEDTASLVVEKFWDSYVDKEFSGTNEMTMTRESFSRWLSKQESSTVGQLADFNFVDLPAVDEYKHMIKSQPKQKLDLSIQDEYPALQTIVYHSKKINAIFGPMFSELTRMLLERIDSSKFLFYTRKTPAQIEDFFSDLDSTQAMEILELDISKYDKSQNEFHCAVEYKIWEKLGIDEWLAEVWKQGHRKTTLKDYTAGVKTCLWYQRKSGDVTTFIGNTIIIAACLSSMIPMDKVIKAAFCGDDSLIYIPKGLDLPDIQAGANLMWNFEAKLFRKKYGYFCGRYVIHHDRGAIVYYDPLKLISKLGCKHIRDVVHLEELRESLCDVASNLNNCAYFSQLDEAVAEVHKTAVGGSFAFCSIIKYLSDKRLFRDLFFV

SEQ ID NO: 239 - protein, 1612 aa, Pepper mild mottle virus
MAYTQQATNAALASTLRGNNPLVNDLANRRLYESAVEQCNAHDRRPKVNFLRSISEEQTLIATKAYPEFQITFYNTQNAVHSLAGGLRSLELEYLMMQIPYGSTTYDIGGNFAAHMFKGRDYVHCCMPNMDLRDVMRHNAQKDSIELYLSKLAQKKKVIPPYQKPCFDKYTDDPQSVVCSKPFQHCEGVSHCTDKVYAVALHSLYDIPADEFGAALLRRNVHVCYAAFHFSENLLLEDSYVSLDDIGAFFSREGDMLNFSFVAESTLNYTHSYSNVLKYVCKTYFPASSREVYMKEFLVTRVNTWFCKFSRLDTFVLYRGVYHRGVDKEQFYSAMEDAWHYKKTLAMMNSERILLEDSSSVNYWFPKMKDMVIVPLFDVSLQNEGKRLARKEVMVSKDFVYTVLNHIRTYQSKALTYANVLSFVESIRSRVIINGVTARSEWDVDKALLQSLSMTFFLQTKLAMLKDDLVVQKFQVHSKSLTEYVWDEITAAFHNCFPTIKERLINKKLITVSEKALEIKVPDLYVTFHDRLVKEYKSSVEMPVLDVKKSLEEAEVMYNALSEISILKDSDKFDVDVFSRMCNTLGVDPLVAAKVMVAVVSNESGLTLTFERPTEANVALALQPTITSKEEGSLKIVSSDVGESSIKEVVRKSEISMLGLTGNTVSDEFQRSTEIESLQQFHMVSTETIIRKQMHAMVYTGPLKVQQCKNYLDSLVASLSAAVSNLKKIIKDTAAIDLETKEKFGVYDVCLKKWLVKPLSKGHAWGVVMDSDYKCFVALLTYDGENIVCGETWRRVAVSSESLVYSDMGKIRAIRSVLKDGEPHISSAKVTLVDGVPGCGKTKEILSRVNFDEDLVLVPGKQAAEMIRRRANSSGLIVATKENVRTVDSFLMNYGRGPCQYKRLFLDEGLMLHPGCVNFLVGMSLCSEAFVYGDTQQIPYINRVATFPYPKHLSQLEVDAVETRRTTLRCPADITFFLNQKYEGQVMCTSSVTRSVSHEVIQGAAVMNPVSKPLKGKVITFTQSDKSLLLSRGYEDVHTVHEVQGETFEDVSLVRLTPTPVGIISKQSPHLLVSLSRHTRSIKYYTVVLDAVVSVLRDLECVSSYLLDMYKVDVSTQXQLQIESVYKGVNLFVAAPKTGDVSDMQYYYDKCLPGNSTILNEYDAVTMQIRENSLNVKDCVLDMSKSVPLPRESETTLKPVIRTAAEKPRKPGLLENLVAMIKRNFNSPELVGVVDIEDTASLVVDKFFDAYLIKEKKKPKNIPLLSRASLERWIEKQEKSTIGQLADFDFIDLPAVDQYRHMIKQQPKQRLDLSIQTEYPALQTIVYHSKKINALFGPVFSELTRQLLETIDSSRFMFYTRKTPTQIEEFFSDLDSNVPMDILELDISKYDKSQNEFHCAVEYEIWKRLGLDDFLAEVWKHGHRKTTLKDYTAGIKTCLWYQRKSGDVTTFIGNTIIIAACLSSMLPMERLIKGAFCGDDSILYFPKGTDFPDIQQGANLLWNFEAKLFRKRYGYFCGRYIIHHDRGCIVYYDPLKLISKLGAKHIKNREHLEEFRTSLCDVAGSLNNCAYYTHLNDAVGEVIKTAPLGSFVYRALVKYLCDKRLFQTLFLE

SEQ ID NO: 240 - protein, 775 aa, Turnip crinkle virus
MPLLHTLNTALAVGLLGARYYPEVQTFLGLPDYVGHMKNVVRSVFQGSGLVVVSSDTVGVRGTYSNRGQIGSSLGCILAVPDSGADIEIDLDRLVGTEEEATSCLVEAVGSTADVPRRRVRQKGRFAMHAVNAAKLHFCGVPKPTEANRLAVSKWLVQYCKERHVVDSHIRTIVNTALPRVFTPDAEDIQVVLDLHSVRAHDHRNALAEAGKVRKWWVNLAMHPMTGRSWSRAWRRLCRLPDDQAISFVRXGCLRELVGRETQISRGENPAMRVFPLANPPKVRRIFHICGMGNGLDFGVHNNSLNNLRRGLMERVFYVEDAQKQLKPAPQPIPGIFGKLSGIRRRLVRLAGNHTPVPREKYPSFYKGRRATIYQKALDSLHDRPVSRKDAELKTFVKAEKINFTAKKDPAPRVIQPRDPRYNIEVGKYLKPYEHHLYRAIDAMWGGPTVLKGYDVGELGNIMSNTWDKFRKTCAIGFDMKRFDQHVSVDALRWEHSVYNAGFNCPELAQLLTWQLTNKGVGRASDGFIKYQVDGCRMSGDVNTALGNCLLACSITKYLMKGIKCKLINNGDDCVLFFEADEVDRVRERLHHWIDFGFQCIAEEPQYELEKVEFCQMSPIFDGEGWVMVRNPRVSLSKDSYSTTQWANEKDAARWLAAIGECGLAIAGGVPVLQSYYSCLKRNFGPLAGDYKKKMQDVSFDSGFYRLSKNGMRGSKDVSQDARFSFYRGFGYTPDEQEALEEYYDNLELLCEWDPTGYKEELSDRWILNEFPTTL

SEQ ID NO: 241 - protein, 250 aa, Turnip crinkle virus
MPLLHTLNTALAVGLLGARYYPEVQTFLGLPDYVGHMKNVVRSVFQGSGLVVVSSDTVGVRGTYSNRGQIGSSLGCILAVPDSGADIEIDLDRLVGTEEEATSCLVEAVGSTADVPRRRVRQKGRFAMHAVNAAKLHFCGVPKPTEANRLAVSKWLVQYCKERHVVDSHIRTIVNTALPRVFTPDAEDIQVVLDLHSVRAHDHRNALAEAGKVRKWWVNLAMHPMTGRSWSRAWRRLCRLPDDQAISFVR

SEQ ID NO: 242 - protein, 818 aa, Tomato bushy stunt virus
METIKRMIWPKKEIFVGDFATGVNRTVPVNIFQLVCRVVLRYMRTGKIECDSDSMTKFIVELLKTDCAAKWEWFMKRRQRGDYIVPLSIASIPIIPLLSYATRVRAVSVKAFGNELSFNVRVPRPSVPKKGLLLRLAAGLALAPICALAVYATLPREKLSVFKLRTEARAHMEDEREATDCLVVEPARELKGKDGEDLLTGSRLTKVIASTGRPRRRPYAAKIAQVARAKVGYLKNSPENRLIYQRVMIEIMDKDCVRYVDRDVILPLAIGCCFVYPDGVEESAALWGSQESLGVKXGGLVRLPGVVTQINRDIPSDVLLPQEVLEVRTGPPNAKDRNIFMVAGCPSQARFLVHNHCLKNLKRGLVERVFCVERNGKLARTPQPTKGAFGRLSPFRKAVCEKVGVAHRLGYDGFLSYYSGAKLRTYTRAVESLHITPVSERDSHLTTFVKAEKISTSKGDPAPRVIQPRNPRYNVELGRYLRHMESKLMKAVDGVFGETTCIKGYTADEVGAIFRAKWDRFDKPVAIGLDASRFDQHCSVEALQYEHSFYRAMYPGNKLLGKLLEWQLHNKGKGYVPDGTITYRKEGCRMSGDINTSLGNYLLMCAMVHGYMRHLGINEFSLANCGDDCVLIVERRNLKQIQRTLPEYFLNLGYTMKVEQPVFQLEEVEFCQAHPVQFQGGWKMVRNVRTAMSKDVHCVNNIRDLATRRAWSNAQHHGGLALSAGIPVVETFYSRFKLYDVPRKHQRIDTVTNVHKWRGSGGSYVVTPESRASFWAAFGLTGDEQLALEDRLERWEMDLFGEEGVDAHEPSILDSAVA

SEQ ID NO: 243 - protein, 296 aa, Tomato bushy stunt virus
METIKRMIWPKKEIFVGDFATGVNRTVPVNIFQLVCRVVLRYMRTGKIECDSDSMTKFIVELLKTDCAAKWEWFMKRRQRGDYIVPLSIASIPIIPLLSYATRVRAVSVKAFGNELSFNVRVPRPSVPKKGLLLRLAAGLALAPICALAVYATLPREKLSVFKLRTEARAHMEDEREATDCLVVEPARELKGKDGEDLLTGSRLTKVIASTGRPRRRPYAAKIAQVARAKVGYLKNSPENRLIYQRVMIEIMDKDCVRYVDRDVILPLAIGCCFVYPDGVEESAALWGSQESLGVK

SEQ ID NO: 244 - protein, 2879 aa, Tomato spotted wilt orthotospovirus
MNIQKIQKLIENGTTLLLSIEDCVGSNHDLALDLHKRNSDEIPEDVIINNNAKNYETMRELIVKITADGEGLNKGMATVDVKKLGEMVSLFEQKYLETELARHDIFGELISRHLRIKPKQRSEVEIEHALREYLDDLNKKSCVNKLSDDEFERINKEYVATNATPDNYVIYKESKNSELCLIIYDWKISVDARTETKTMEKYYKNIWKSFKDIKVNGKPFLEDHPVFVSIVILKPIAGMPITVTSSRVLGKFEDSPSALHGERVKHARNAKLLNISYVGKIVGTTPTVVRNYYANTQKIKSEVRGILGDDFGSKDVFFSHWTSKYKERNPTEIAYSEDIERIINSLVTEEIPKEEIIHFLFGNFCFHIETMNDQHIADKFKGYQNSCINLKIEPKADLADLKDHLIQKQQIWESLYGKHLEKIMLRIREKKKKEKEIPDITTAFNQNATEYEEKYPNCFTNDLSETKTNFSMTWSPSFEKIELGSEVDYNNAIINKFRESFKSSSRIIYNSPYSSINNQTNKARDITNLVRLCLTELSCDTTKMEKQELEDEIDINTGSIKVERTKKSKEWSKQGSCLTRNKNEFCMKETGKENKTTYFKGLAVMNIGMSSKKRILKKEEIKERISKGLEYDTSERQADPNDDYSSIDMSSLTHRKKLIRHDNEDSLSWCERIKDSLFILHNGDIREEGKITSVYNNYAKNPECLYIQDSVLKAELETCKKINKLCNDLAIYHYSEDMMQFSKGLMVADRYMTKESFKILTTANTSMLLLAFKGDGMNTGGSGVPYIALHIVDEDMSDQFNICYTKEIYSYFRSGSNYIYIMRPQRLNQVRLLSLFKTPSKVPVCFAQFSKKANEMEKWLKNKDIEKVNVFSMTMTVKQILINIVFSSVMIGTVTKLSRMGIFDFMRYAGFLPLSDYSNIKEYIRDKFDPDITNVADIYFVNGIKKLLFRMEDLNLSTNAKPVVVDHENDIIGGITNLNIKCPITGSTLLTLEDLYNNVYLAIYMMPKSLHNHVHNLTSLLNVPAEWELKFRKELGFNIFEDIYPKKAMFDDKDLFSINGALNVKALSDYYLGNIDNVGLMRSEIENKEDFLSPCYKISTLKSSKKCSQSNIISTDEIIECLQNAKIQDIENWKGNNLAIIKGLIRTYNEERNRLVEFFEDNCVNSLYLVEKLKEIINSGLITAGKSVTSKFIRNNHPLTVETYLKTKLYYRNNVTVLKSKKVSEELYDLVKQFHNMMEIDLDSVMNLGKGTEGKKHTFLQMLEFVMSKAKNVTGSVDFLVSVFEKMQRTKTDREIYLMSMKVKMMLYFIEHTFKHVAQSDPSEAISISGDNKIRALSTLSLDTITSYNDILNKNSKKSRLAFLSADQSKWSASDLTYKYVLAIILNPILTTGEASLMIECILMYVKLKKVCIPTDIFLNLRKAQGTFGQNETAIGLLTKGLTTNTYPVSMNWLQGNLNYLSSVYHSCAMKAYHKTLECYKDCDFQTRWIVHSDDNATSLIASGEVDKMLTDFSSSSLPEMLFRSIEAHFKSFCITLNPKKSYASSSEVEFISERIVNGAIIPLYCRHLANCCTESSHISYFDDLMSLSIHVTMLLRKGCPNEVIPFAYGAVQVQALSIYSMLPGEVNDSIRIFKKLGVSLKSNEIPTNMGGWLTSPIEPLSILGPSSNDQIIYYNVIRDFLNKKSLEEVKDSVSSSSYLQMRFRELKEKYERGTLEEKDKKMIFLTNLFEKASVSEDSDVLTIGMKFQTMLTQIIKLPNFINENALNKMSSYKDFSKLYPNLKKNEDLYKSTKNLKIDEDAVLEEDELYEKIASSLEMESVHDIMIKNPETILIAPLNDRDFLLSQLFMYTSPSKRNQLSNQSTEKLALDRVLRSKARTFVDISSTVKMTYEENMEKKILEMLKFDLDSYCSFKTCVNLVIKDVNFSMLIPILDSAYPCESRKRDNYNFRWFQTEKWIPVVEGSPGLVVMHAVYGSNYIENLGLKNIPLTDDSINVLTSTFGTGLIIEDVKSLVKGKDSFETEAFSNSNECQRLVKACNYMIAAQNRLLAINTCFTRKSFPFYSKFNLGRGFISNTLALLSTIYSKEESYHFVSTASYKLDKTIRTVISAQQDMNLEKILDTAVYISDKLQSLFPTITREDIALILQNVCLDSKPIWQSLEDKMKRINNSTASGFTVSNVILSHNSELNTIQKQIVWMWNMGLCSHRTLDFVIRYIRRSDVRYVKTEEQDESRNYVSGTMYKIGIMTRSCYVQLIASDHDVAVSLRTPFEILNEREYLFDTYRESIEKLLQKFMFDKVNIIKSKQPQIVFLEPGDACIRMTTDNKMIVKVNATSRQIRLENVKLVVKIKYENVNSDVWDIIEGQKSLVLRLPEVGECFSDMYKTADSETETIKTIKNRLMTSLTFIEAFGNLSQQIKEIVYDDIRETMDEFLMNIRDTCLEGLENCKSVEEYDNYLDEDGFNDTVELFENLLRTHDNFEDEYSPLFSEIVDKAKQYTRDLEGFKEILLMLKYSLINDASGFKSYRATGMHAVELMAKKHIEIGEFNLLGMIQLIKACETCHNNDSILNLASLRNVLSRTYATFGRRIGLNHDLDLQNNLMEKSCDFKTLVLPDIKLSELSREILKENGFVISGENLKMDRSDEEFEGLASFNVLRLDEEEMYEGLIKEMKIKRKKKGFLFPANTLLLSELIKFLIGGIKGTSFDIETLLRNSFRPDIFSTDRLGRLSSSVPALRVYATVYMEYKNANCPLNEIADSLEGYLKLTKSKPKEHFLHGRVKKALIQLRDEQSRTKKLEVYKDIANFLSRHPLCLSEKTLYGRYTYSDINDYIMQTREIILSKISELDEVVETDEDNFLLSYLRGEEDAFDEDEIDEEEDTD

SEQ ID NO: 245 - protein, 2878 aa, Watermelon bud necrosis orthotospovirus
MNIQTINSFLDASGETTAYLQRIKDEIMLMSNVIEQGYSEGKGVIESGLSSIMSMNYILDKIEDMKSKYHQSSSSIDQREMETEIYLFLDKYKELELMRHDLFGVLAGRRLHFVPKHRSDVFMKDCLMSYIEFCSASVSISNKIDNLDSLKEKLIFQHLTPDNYTIYKETKGEKACLMIYDWKVSVDAVSEGKTSENYYTSVWKTFKDITIDEEPFLERHPIFITIVVLNPSGNMPIVATTCRVVQEFRNSPYKTFNDRKRAAEAAKLISVNSLGQLIGLGADCFRRFYSETQSFKNSLLSKVGKYMNRSSEVFFSHWSCEYRKTNLSNNQISQDIIDLINSLPNDVVGKEILVHFLFGNYLYFKETMSELHLKDRFEGYRSHCKMMRIRPLENEEKLKDYLDRNEHIFESLYETHLKKIKSDVLLRKSKEIEIESIERAFNINAEEYQKEYPGCFTNDLQETKTNFSICWSPMTEELKMNDLNYNNAIIQSFRDALSEQPKLIHHKSYGGAKVDTYFSTTLFNLVRACLVDLSTDTTGHSKATLEDVVDIKDGSIQVKRTEASQRWREIGNVKTRNGNEFTLSPQADTEARKNFFRGLNLMYVDMGKKKKIDIKNELKSKIQESMAQQKNENMDGPSGEYDVSKANIPHQTSLKGITHNKKLIRHDNPDVKYHCESMIESMYVLHGMDERKDKNSKINSVYNEYCSNPSSLFTKGNLIETEMTIAKNIHEVAKELSIYTYSEDMMQMAKGLMVADRFMKKTDFKILTCANTSMICLAFKGDGINTGKSGVPYITIHKVDKSIQPHFVSLYTKELIVSFKSENYFINIMRPQRLNQVRLLSLFKAPSKVPILFSQYSLLSTEIKKWLNQQSIDVFTCPENKIQYLQKILFSSVIIGTVTKLSRMGIFDFMRYARFLPLSDYSNIKEYIAEKFDPDITNVIDCFFVSGIKNLLLKMEGINLSNSIKPLTIDQENDMSGGISDLDIICPITGSTLKTIECLYNNVYLAIYMMPKSLHTHVHNLTTLLSVPAEWEIKFREKMGFMIGDEIKPKKEMFNDSGPFSINGVLNVKTLFDYYKKNITNVGACRSNIEEKEDFLSAPYKIKTLTSSKKCSKADIIKSTEIVAALKSSYGKQPDDIKGSDLYILKGVLKCFDEDRDSLTNFLEVEGLEESKYLHFFTNMMSGDNKILMKTNQDKFYYKSHPLTVETFMKVRYGYFKTTTVLKSKKVSEELYDLIKEFNKITEVDLEALEKLGRGLKGNRVTFIQLLEFILMKSRTNAGNTDFLVSIFEKMQRTKMDREIYLMSMKTKMMLYFIEHTYKHVAQSDPSEAISISGDYKIKNLASLSYDTITNYNTALQKNLECKMAFLSADQSKWSASDLTYKYILAVIMNPLLTTGEINLMCECIMMYVKLKRVCIPTDIFLNLKRGQTEYGSYGTALSVLTDNLETNTFPVSMNWLQGNLNYLSSVYHSCAMMGYEKAMKKMGNYDFTIRWMVHSDDNATSMVVRGDIKELLAEFNCTSLSELLFRSIQSHFKSYCITLNPKKSYASESEVEFISERIINGAVIPLYCRHLANCSTESSHNSYFGDLMSLSIHITMLLRKGCPNELIPFAYAAIQIQFLSIYSMLPGEENDISTIVKEIDFPLSKREIPICAGGWMYAPIELLSILGPSSNDQLIYYKIILDFFNLKDFSSLKKSVNSLGYIDLRINELFKRIKYQKITNADKKMICMVNLFKTSLMSEDCDSLNVGMKFQSMITQIIKLPSFVSEGSLLKNSSFQDFCKLFPNLKKNTDILNALKPVNLDERSLEELNESKFLSQIQLEELSRHMASHPESFLIAPMNDKDYILTNLYTYSSVSKRNQMLNQSTEKLALDRILRSKAKTFLDPNSKEMVSYKENMSMKMREIMSYAGNDFKIINTISSLMVRDMNFEMVVSLMENTVANASIPKANYNFRWFITEKVPSVIEGSPGLIVMSAVYGMDYLIELGLKKLPLTETSISILHDIFGNRKTFDDVKECIQNVKKQYKTEEFQNADVLKRYVLSINYMIQSQNKLLSINTCFSRKNFPFYSKYNLGKTFITNTLAIWSTIYSRLTNINFYTNLNFVIDRSSRLIISLQRDMNLEKLIDCCAYVSDRLQSLFPDMTVESIRQVLCRLNFNGVDLMKKMKSEIAEVKRAINNIKTSTHVTLSFRPQMIAMSKHAAWLYNFGYINEKEFKFVIDQIRQSEVHYIKTDEQDVRGYYVSGHTYKIGIKTQHNYGQLAMSNQDVSIHLHSPYEYKREDDGKIWDVHVRSVYKLLQKLLMDKQSVIKAFLNIRTELMPNQFCIHESSNKTLLILINDTTRPISLERIKFKGDIKYIPSSDFAWDMMSNQSKYRLRQAETGECYTELYKLIDNNDNLMNTILTNLKKSLEYGNEMENLIEQSIQGIDDADTIEYIQESVDQIHKLAIEGLETCQTSDEFENYLKRVDFQSTVDFHKDLLEQIVEEKYGSAERLDVAVEKLTKWTNSLSTFKDVCTMLKFSMVNDSKGIKTYKANGADFHSLSASEVMTSQGFDLFELLKLIKACEACHTSNSVLNLIAFKNIKNKTFIPGFKRHLPNTVHFDYEMKLNNEVMNKFYEYKTISLQDIKVSDRVKRVLETNGFSITGHNLKLEETNLELNPVEIIDDSSTYDQVAKQMRLTKKKSSYLIPANTLLLGELMKFLMLCIKGEEHDIMKLLRSHFAMQPVRENRLLCIQDAVMTCRISGYIQRHFLNDKKEIVLLGVADSLENFISLATPNYATQEPFKAEALIKKALAEVYDSGKYKILKNIRNYIVDDVEFLTEKCLYSNITNEEISNMIFNAVSKIDLELSNLKPKKRKKRLDLHDVFNGFLGSDATTSEQQ

SEQ ID NO: 246 - protein, 1844 aa, Turnip yellow mosaic virus
MAFQLALDALAPTTHRDPSLHPILESTVDSIRSSIQTYPWSIPKELLPLLNSYGIPTSGLGTSHHPHAAHKTIETFLLCTHWSFQATTPSSVMFMKPSKFNKLAQVNSNFRELKNYRLHPNDSTRYPFTSPDLPVFPTIFMHDALMYYHPSQIMDLFLRKPNLERLYASLVVPPEAHLSDQSFYPKLYTYTTTRHTLHYVPEGHEAGSYNQPSDAHSWLRINSIRLGNHHLSVTILESWGPVHSLLIQRGTPPPDPSLQAPPTLMXSDLFRSYQEPRLDVVSFRIPDAIELPQATFLQQPLRDRLVPRAVYNALFTYTRAVRTLRTSDPAAFVRMHSSKPDHDWVTSNAWDNLQTFALLNVPLRPNVVYHVLQSPIASLSLYLRQHWRRLTATAVPILSFLTLLQRFLPLPIPLAEVKSITAFRRELYRKKEPHHPLDVFHLQHRVRNYHSAISAVRPASPPHQKLPHALQKAALLLLRPISPLLTATPFFRSEQKSMLPNAELSWTLKRFALPWQASLVLLALSESSILLHKLFSPPTLQAQHDTYHRHLHPGSYSLQWERTPLSIPRTTAFLPFTPTTSTAPPDRSEASLPPAFASTFVPRPPPAASSPGAQPPTTTAAPPTPIEPTQRTHQNSDLALESSTSTEPPPPPIRSPDXTPSAPVLFPEINSPRRFPPQLPATPDLEPAHTPPPLSIPHQDPTDSADPLMGSHLLHHSLPAPPTHPLPSSQLLPAPLTNDPTAIGPVLPFEELHPRRYPENTATFLTRLRSLPSNHLPQPTLNCLLSAVSDQTKVSEEHLWESLQTILPDSQLSNEETNTLGLSTEHLTALAHLYNFQATVYSDRGPILFGPSDTIKRIDITHTTGPPSHFSPGKRLLGSQPSAKGHPSDPLIRAMKSFKVSGNYLPFSEAHNHPTSISHAKNLISNMKNGFDGVLSLLDVSTGQRTGPXPKERIIQIDHYLDTNPGKTTPVVHFAGFAGCGKTYPIQQLLKTKLFKDFRVSCPTTELRTEWKTAMELHGSQSWRFNTWESSILKSSRILVIDEIYKMPRGYLDLSILADPALELVIILGDPLQGEYHSQSKDSSNHRLPSETLRLLPYIDMYCWWSYRIPQCIARLFQIHSFNAWQGVIGSVSTPHDQSPVLTNSHASSLTFNSLGYRSCTISSSQGLTFCDPAIIVLDNYTKWLSSANGLVALTRSRSGVQFMXPSSYVGGTNGSSAMFSDAFNNSLIIMDRYFPSLFPQLKLITSPLTTRGPKLNGATPSASPTHRSPNFHLPPHIPLSYDRDFVTVNPTLPDQGPETRLDTHFLPPSRLPLHFDLPPAITPPPVSTSVDPPQAKASPVYPGEFFDSLAAFFLPAHDPSTREILHKDQSSNQFPWFDRPFSLSCQPSSLISAKHAPNHDPTLLPASINKRLRFRPSDSPHQITADDVVLGLQLFHSLCRAYSRQPNSTVPFNPELFAECISLNEYAQLSSKTQSTIVANASRSDPDWRHTTVKIFAKAQHKVNDGSIFGSWKACQTLALMHDYVILVLGPVKKYQRIFDNADRPPNIYSHCGKTPNQLRDWCQEHLTHSTPKIANDYTAFDQSQHGESVVLEALKMKRLNIPSHLIQLHVHLKTNVSTQFGPLTCMRLTGEPGTYDDNTDYNLAVIYSQYDVGSCPIMVSGDDSLIDHPLPTRHDWPSVLKRLHLRFKLELTSHPLFCGYYVGPAGCIRNPLALFCKLMIAVDDDALDDRRLSYLTEFTTGHLLGESLWHLLPETHVQYQSACFDFFCRRCPRHEKMLLDDSTPALSLLERITSSPRWLTKNAMYLLPAKLRLAITSLSQTQSFPESIEVSHAESELLHYVQ

SEQ ID NO: 247 - DNA, 3199 bp, Solanum lycopersicum
  source 1..3199: mol_type = genomic DNA
tcccaaaactcattatttaattttcttctttaacaaagttgacgagacaaaagcaaaatatatacaggaaaaatgggtgatccgttgattgaagaaattgatgttctggatgcacctttaccatattctgtagagacgatgcttgatagaatctgcaaggagcaggggcaaaaaccaccgtgtactggcattagaaggaggctgagctctattggtgaaaaagggtcattagaaatgctcaaaataatatcacgtcgtcctatcaagaagagtctctctgcttttcttgtttacatgattgatcgctacccggattgtctctcctcttcctctagccccttcaattgtctactcaaacgctcttcttcccctcgtctctttccatctccagagggtaaacgtttacaaggtgaaagttcttctaaatcaaagcttgagatgggcttattggcctgtgcaagccctcagaaagttgctcgccagttatcattttgcgaggagcctgaatctaactgtagaagaacctccccttatgtcagccaacagttgatgatcctcaatgaacttgaatttagaaaattgtttctggtactgagctacattggatgcaacaagttggaagatgttatatcccctcaaattgctgatgatattgtaagaaagaaaaatctttccatgactgattttgaatcagaaatttggaatgcttttggaaaagcatgttatgctgtgtcagatagatcaaagtacttagactggaattgcagaaagacacatatctactattgccacattaagcagaacggatactgttccttcaagggtccatacttgaacacattaaggactcacttacagagagccctgggagatgacaatgtactgattgtaaaatttgttgaagatacaagttgtgccaatataattctcgaggaaggcattcttgttggcttgagacgttaccgtttctttgtgtataaagatgataaagagaggaagaaaagtccagctatgatgaagacaaaaactgcttctttgaagtgctactttgttaggtttgagtccattggaacctgcaatgatggagaatcctatgtattttctaccaaaacaatcagtcaagcaaggtgtaaattcatgcatgtgcatatggtttctaatatggcaaaatatgcagccaggctttccttaattctatcaaagacgattaagcttcaaacagatcttgattctgtcaccattgaaagaattgaagatatactttgtcgggatgaaaatggttgtattattcaagatgaagacggcgaacctcgtatacatactgatggtactggtttcatatcagaagatttagctatgcattgtcccaaagatttttcaaaagcagaatatataaaagatgaaaattatgagaattttgttgatatcgtggaccttgatgacgtgaatgtagaaagaagagtgagtgtatctcgcaataggaaaccgcctttgttgatgcagtgccgtttgttcttcaatggttgtgctgtgaaggggacttttcttgtcaatagaaagattggatcacgaaaaattcatattagaccctcaatggtgaaggttgagatagacccaacaatttcaagtataccaacttttgactcattggagatagttgcaatcagtcatagaccaaataaggcatatctgtccaagaatttaatctctctgctgagctacggaggagtccataaagaatactttatggaacttttgggaagtgcgctggaagagacgaaacaagtatatttgaggaaacgtgcagctctaaaagttgctatcaactatagagaaatggatgatgaatgtctaacagcaaggatgatatcgtctgggatacctctcaatgaacctcatctccatgctcgcttgtctaggcttgcaaagattgaaagaactaagcttagaggaggaaagcttcctataagtgacagtttttatcttatgggaacagctgaccccactggtgtactggaaagcaatgaagtctgtgttattctagataatggccaagtatctgggcgtgttttggtctatagaaatcctggtcttcactttggagatgtacatgtgatgaaagcgcgatatgtggaagagcttgcagatgttgttggtgatgccaaatatggtatatttttttcaactaaaggcccgaggtcagctgctactgagattgcaaatggtgactttgatggtgatatgtattgggtttccataaaccgtaagttggtagattcttatacaacaagtagaccatggattcgcatgcattcaactcctaacgcagttagcaaaaaaccaagtgaattttcagctgatgaattggaatatgagctttttaggcaatttctggaagcaaagtctaaaggtgccaatatgtctctggcagctgatagctggctggcatttatggatcgtcttctgacgctgcgagatgataatgtggatgatatgcatagcttgaaaggcaagatgcttcacctgattgacatctactatgatgcattagatgcacctaaaagcgggaagaaggttagcatccctcattatctgaaggcaaacaagttcccccactatatggaaaaagggaactcctgcagctatcattcaacttctattctgggtcagatttatgatcatgtcgactcatatccagatgaagatttgtgtataacagaaatctctaaactgccttgctttgaagttgaaatccctcaaagatgcatgacattgtggagaggaagatatgaagagtacaaaaaggatatgacacgggccatgaactttgattgtgaactaagaatcacctcttgcaatgaagttataaagaagtacaagatgttgctatatggtgctgtggagtttgaacaaacagtaagaaagactgaagacattttcgacgaggcccttgcaatatatcatgtaacatatgataatgcaaggatcacatacagcatagagaaatgtggttttgcttggaaagtagctggttctgcgctttgcaggatccacgccatgtatcgcaaggaaaaagacttgcccattttgccatcggttttgcaggaaatactctagacgtattgtaacattgaagtgatcaataaatatctacttagcattctattctatgtgatgacgtccaaatttacttctcaaa

SEQ ID NO: 248 - DNA, 4902 bp, Arabidopsis thaliana
  source 1..4902: mol_type = genomic DNA
gttgttgctgtctcctctctcaatggctacctcctgcgactgaaacggtaaacctttattctctttagattcgtgtgtattcatcagtatatggtcatgttacaataatatattgcttattaactgatcaatctgttactgtcctgccctgcttactatagtagacagtttctgtggttttgtaatacttaggcatgtgttaactattattagaggacttacagtgagttaaggtgtcttcgtgtgtgtttctctcaaaatgatatatttgttactctgtacatatatatatatatgctcgtggaatcctgatgagaatttggttacagctttatcaatcctctaaatagttttcaacagtgcaaggttttgtgttcctctcttgaaaatatagtctctgaagtgttaacgagctctatatgactgtttgcagagttcaggcagcaatgtaaatgagctggagaatataagcaatgataggactgagtcaatagttcaagaacgtgaaggttctgacaactaagcaaactgcttcttcaatttggttcgataactgtagataaattgtgataaaatatcttttatttgatcaatcattacattattgtagagaatcctcagccaagagattggtagctagatagataaggttgacttggagtcaacttcttccttatagctttcttcatttaatatagtaaacgtttttaactcatttttttccagagaatctgtacccttggcgttcttgtactggttcatcgtagatgattctcgacgactagttgttatggctgaagcatttgtgtcgtttggacttgagaagctttgggatctcctgagtcgagaatcagagcgattgcagggaattgatgggcaacttgatggactaaagcgtcagctgagaagtttacagtcgttgttgaaagatgcagatgccaagaaacatggaagtgatagggtgaggaatttcttggaagatgtcaaagaccttgtttttgatgctgaggatataattgaatcctatgttctgaacaaacttagtggaaaaggaaaaggggtcaagaagcatgtgagacgacttgcttgcttcttgacggatcgccacaaggttgcttcagatatcgagggtatcactaagaggatctctgaagtgattggggaaatgcagagttttgggatacaacaaatcattgatggtggtcgttcgctgtctcttcaggaaagacaaagggtgcagagggagatccgacaaacgtatcctgacagttctgaaagcgatcttgtcggggtggagcagagtgttaaagaattggttggtcatttggtggagaatgatgttcatcaagtggtttctatagctgggatgggcggtattggtaaaaccactctggctagacaagtctttcatcatgacttagtccggcgtcactttgatggattcgcatgggtctgtgtttcccaacaatttacacagaaacatgtttggcagaggatcttgcaagaacttcagccacatgatggggatattttacagatggacgaatatgcacttcagcgtaaactctttcaattgttagaggccggtagatatttagttgtcctcgatgatgtatggaaaaaagaagactgggatgtaataaaagcagtgtttccacggaaaagaggtgagctcttatggtacatacatgaagcactttttcttcttaattcataaaagtgattgttaaaaaagaaatatatagaataattgccttttttattccctagcatgagaaacacaaatatttttgcaggttggaagatgctgcttacttctcgaaatgaaggtgttgggatacatgctgatccaacatgtttaacttttagagcaagcatccttaaccctgaagaaagttggaagctctgtgagagaatagtattccctaggagagatgaaactggtacatatcttattatataatgtttagtttctctaacttttaagaaaaatacatttacatatactaatttacatgtatatatttatattattttataaattttaattttccttaaccaaaaagtaatatttgtatacatattgctattttttccttactattagaacaactaactaaaaacgtatggtaatccatatgctaatttaggcatgtataaaaaaaaaagtcaatggtaatcttgattttgaccaaaaaataattaatttaattagcatgaacaatgagtgttgttaaggttcaaaaggacaatataattattaaacattaatttaattggataacaattaaaaaaattaactattaatcctagtacagtaagtcagtaattacgaatcttgaaaattggttttggtttttttcttcctattttttataggtttattcaaattagaaatatcgaattatctacttttatggtttattcatgattggtttgattaaaatttaacgtaataaaatcaactaaatttgaaagaaacatgtattgattaacccgtgattacacgattccttgtaataaagttcaaatagaatactaagaccaagaatctagtgtattattttaatttggcagctcacatgttgaaatgtattagcttgtgatattgtgcagaagtaaggcttgatgaagaaatggaagccatgggaaaggaaatggtcacacattgtggaggactaccattagctgttaaagcgttgggaggcttgttagctaataaacatactgttcctgagtggaaaagagtttttgacaatattggatctcaaatagtaggaggatcgtggttagatgacaacagtctcaattcggtttaccgaatattgtctctgagttatgaagatttgccaacgcatttaaagcattgcttccttaacctagcccatttccccgaagattccgagatatctacgtatagtttgttctattactgggctgcagaagggatttacgatggatcaaccatcgaagatagtggagaatactacctagaagagctagtgaggagaaatttggttattgcagacgacaactatttgagttggcaatctaaatattgtcaaatgcatgacatgatgagagaagtatgtttatctaaagccaaagaagagaacttcctacaaattatcatagaccctacttgcacctctaccatcaatgctcaatctcctagtagatctcgcagactcagcatacatagtggtaaagcctttcatatattgggacacaaaaacaagacaaaggtgagatctcttatagttccgagattcgaggaagactattggatacgatcagcttcagtcttccacaacttaacattgctcagggtgttggatctttcttgggtaaagtttgaaggagggaagttaccttgtagcattggagggctcatccacttgagatacttgagtttatacgaggctaaggtatctcatctaccttctactatgcggaacctaaagcttctgctctatttgaacttacgtgttgataccgaggaaccgattcacgtgccaaatgttttgaaagagatgatacagttgaggtacctttccctacctcttaaaatggatgataaaaccaagttggaattgggtgatctagtgaacctggagtacttgtatggtttctcaacgcaacacagtagtgtgacagacctcctccgtatgactaagctccggtatctcgctgtatctttgagcgaaaggtgcaattttgaaactctatcgtcatctctccgcgaattgcgaaacctcgagacgcttaatttccttttttcgctcgaaacatatatggttgattatatgggagagtttgttctggatcattttattcatctaaaacagttgggattggcagtacgtatgtcaaagattcctgatcaacatcaattccctccccaccttgtacacttatttctaatttattgcggcatggaagaggatccaatgccaattctagaaaagttgcttcatttgaagtcggttcgtttagcacgtaaggcattcctagggagcagaatggtgtgctcaaaaggcggatttcctcaattatgtgttatagaaatatctaaagaatcagagttggaagagtggatagtagaagaagggtcgatgccatgtcttcgtactttgactatagatgattgcaaaaagttgaaggaacttccagatggactcaagtacataacatccttaaaggaactgaagattgaaggaatgaagagggagtggaaggagaaactggtaccaggtggagaagattactacaaagtccaacacattcccgatgttcaatttatcaactgtgaccagtagcaggtaaaaaataaattgtatagtgttcactttgtttttttctgttgttgttggattcgtgtgaaagtcatgtggacagtctcaactattatacattgttctaacatcgatcatctttgaaataagatgcaggaaagaccaagaagcgagccaaattctcttatattgggagatatagacgctgcttcaacagagtcatctgctgatcaacaggtttttccgaagaatatctggtattgcttatgaagaatacagattctcaagtattaacgattatgtttccagtcttggagctctcgctttttcagtgcatcgttatgttgtgcggctcagaactatattatagaaacaatgcttatattgttgtttgtttttgatgtggatgcatggaacatgcttgagaactcttttacaaaatggagaaacgaaacttgtaaaatttggatattttatgtttgttgtaaaatttggatattttgtgtttgtgtaaaatttggatattatatgttttgctttctcgtttgtgatttaacacagttcgttttgtaagctttatttacagtttacaccatcaaatcttgtc

SEQ ID NO: 249 - DNA, 2931 bp, Arabidopsis thaliana
  source 1..2931: mol_type = genomic DNA
tttctcttcttttttttccctcacttctccaacaaactcgatttcccgatttcgtcgcctcttctcgtctctccgctctcctcgccgcgagtctgtttcgccgccgtctatctcccaattccggtacatcctaaaccatttccccttttaatccaacctgtgttgatttctaatcgcgattaatctcagttaggtttaattgcttgatctcagttgaaattagggcgtaatctcattactaaatgtagcaaaaatcgacaatatagtctcgtctctctgttatagcaatcaatttgtgagattctgaattttggcagaatcctaattctgaagtttggctaatatagaacctgtaattgtgttttttcatttatgagatgttttattaactttgttagtcacaaattgatttcatgtgtataatgttcattatttcgattttgttctcgtatgcgatattacgttcttggctgtgatatctgaagtaaagctgttgtaatctaagtttttcttctcttgattttaaacagtgaccgttgttgtttagtgaatcgatgatttacactgctatcgacaatttttacctatccgacgagcagctgaaggcttcaccttcgaggaaagatgggatagatgaaacaactgaaatctctcttagaatctatggatgtgatctcatccaagagggtggaatattgctcaaactgtatcctttttcttggtctaattattaagcaagactcaaatgttacgtagctgtgattttcttaacttagattgtttattttagaccacaggcagttatggctactgggcaggttctgtttcagcgattctattgcaagaagtctttggctaaatttgatgtcaaggtaaattattttgtttctttcttctagttttgtgtgtttatgaaagtatgataattctttaggagtgtatatactcctgcctatgaccataatgatttgatatgtagtttaatttttacagatagttgctgccagctgtgtatggcttgcatcaaaactggaagaaaaccctaaaaaagctagacaggtcatcatcgtattccacaggatggagtgtcgcagggagaacttgccattagaacatctggatatgtatgccaaggttagtttgcaattgcatttgtcatattgaatgttttttttcgtatattttgtttctactcatgggatagctttatttggaagtacttttatgggatctcatcttttttcctacttgttaaatatctgcagaagttctctgagttgaaagttgaattaagcagaactgagagacatatactgaaagagatgggttttgtttgtcatgttgaacatcctcacaagttcatatcaaactaccttgccacattagaaacacctccagaattgaggcaagaagcttggaatttggccaatgataggtaatctctattctcaaaatcctaatatggatattatttcatatgatttcctaatagttagctacacatcatagtgttgataggttttagagttgatgtttatcctgaagcttggcatttctcctgttctagtttgattttgagtatgtttgttatactttctcaatatctgataattcctttatgattttatcttaatctcatgatatgtctataatgcagtctgcgtacaaccctctgtgtaaggttcagaagtgaggttgtggcttgtggggtagtgtatgctgctgcccgtaggtttcaagtaccactccctgagaatccgccgtggtggaaagcatttgatgcagataaatctagtattgacgaagtgtgtagagttcttgctcatttatacagtcttccaaaggctcagtatatctctgtttgcaaggatgggaagccatttacattttctagcagatccgggaattctcaaggtcaatcagcgacaaaggtgaggtagatcgctttcttggttttgtaatttttgtgaaaacatgagattattgtccatattactgctattatagactcttaaagttgagtgcgtttcttacacagtagtaaacagagtttctaccaccacattgcatgttatatagtattgaaaaagggctgtctactttattatttcggcttgggaaaatctgcaatccaagtgcattttctatgtctgtaatcagagctaggtttgaagtgcttttaacactgttacaggatctgttgccgggagcaggcgaggctgttgatactaaatgtactgcaggatcagctaataacgacttgaaggatggaatggttactacaccacacgaaaaggctacagattccaagaaaagtggtaccgagtcaaactctcagccaattgtaggagactcaagctatgaaagaagtaaagtaggagatagagaaagagagagtgatagagagaaggaacgaggtagagagagggacaggggtaggtctcacagaggcagagattctgacagagacagtgatagggagagagacaaactcaaagatcgaagtcatcatcggtcaagagacagattgaaggattcaggtggacattcagataaatcaaggcatcattcttctcgggaccgtgactaccgcgactcatcgaaagaccgtcgtaggcaccattaagccaatcttcttgtcatctacatccccttgagcctacttgatgttaagacagtatagtgttgtattgtgttaagagtcaaaacccatgtgtacttaatcacatgctaagatcacgttggttcgacatataaaatcgagaaagtctgatatgtttctaatttggaattttgtgaaaagtgccttaaactttggaaaagtggttttttgacttttgacttgtgagttgttgtgaccgagcagagaggagaataatagtatccaaatctgacttgtggcacatgatggtaggcttaaagcacgttcaa

SEQ ID NO: 250 - DNA, 2681 bp, Brassica rapa
  source 1..2681: mol_type = genomic DNA
gagaacgattcgggaagtggcagttcaaatcttgtgttgcagctggtaatggcttttgcctcttcctcatcgagtattgttttaagcaaatgtgaattcgatgtcttttctttccatggtgcagacgtacgtaagaattttttgtcccacgtgcttatcgagctcaaatcaaagggcatagatgttttcattgacaacgatatccgccgatcgaaaagtataggaccttttctaattgacgcgatcaaggggagccgggtcgctatagtactgttatctgaagattatgcctcctcaacttggtgcttgaatgagcttgtggaaattatgaaatgtagaagggagttcggtcaaaccgttatgcccatcttttaccaggtcgacccatcggatgtaaagaaacaaacaggcgaattcggaaaggtgtttcagaaaatatgcaaggggaaaacagaggaaaagattcgtcgctggaaagaggcactcactgaagttgcgaacatcgctggtttccatagtagcaattggaagtctgaggccgaaatgatagagaaaattgcaaccaagatctccaacaaactaaatctgtcagtcccgtgttcgtattgcgacggcttagtaggaatagaaagtcacatgacagagatgcgaagcttgctttctctcgattgtgacgaagtgcggaaggttgggattctaggtatggcgggcatcggaaaaacaactatagctagatccctgtacaacaggcattgccaaaattttcagcgtttcgatggttgctgttttctttcaaacgagattgacgaattgaagcttcaaggtatcgatcagctccaacagaaactactgataaagttattggacgatgagacccttgaagtcggcgcctcgctcggagcacacaaagtactaaaggaccgcctgttaaataaaaagttgttcattgtgcttgataacgttgacaataaacaaatcagtctcctaataggggaggcgggtaagcagctgtatcgagatggcagccggattatcataacaacaagagacaaaaagttattggataaagtcgtagacggaacttacgtggttcctaggcttaacgggcgtgaagctctcgagcttttctgctcgaaagcatttggtaatcattatcccaccgaagagtttgtcgatctgtccaacgacttcgtatgctacgcaaaaggcttaccattggcgcttaagctcctaggaaaagggctgttaacacacgatattaattattggaagaaaaagttggaatttcttcaagtgaacccggacaaagagctccagaaggaactaaaatcatcgtacaaggctctggatgacgatcaaaaaagtgttttcttagacatcgcctgttttttccgcagcgagaaggcagattttgtctcttccatattgaaatcagacgatattgacgcgaaggatgtaatgcgagaacttgaggaaaaatgcctcgtgatgatctcgtatgaccggatagagatgcatgatctactgcacgctatgggtaaggaaattggcaaagagaagagtatcagaaaagccggagaaaggcgtcgcttaagcaattgtgagttgcttctcgacatactatctctgttattcgcaaactccgggtcagaatgcttgaagggtgattttaaagcgcttaatgagattaaggctatcaaaggcttccctgccgcattttcgatgctcggagacgatccctgtggggacggtgatttcctaaagtttcatggcagtcactgcagcactcagggagacaaccgagttgtcaccgatcatgaattccaagcgtctaaaatagtagggccatttccgattgctgtgacaaatctgttagacttgatgcggcttgatctccacaacaagctacctggtaaattcgaccccaaggagctgaaagatttatccttgagatggaatcatatcaaggacgttataccaccggaaattggcgagcttgaaaggctccgtcacctagatctgggatttaactcattcaaaggggagatccctaaggaattagccgcattgcccgagcttcgcgcgaaaaatctcgaagagctagacctggaaggtcgaataccagctgagtgtggctcgttacagaacttgcggcatcttgatgccggaaataaccacctcgtcgggaatactagagactgcattaggtttgatggtctattcaagggctttaaaatcaagagtctgaaaaacttaatattgagcggatgtattaaggcaaaagacttccatatcatatctgaagagattgtataccttcacctcgaaaagtttatctgcaatataccgttcgcgattgctcatatccacaaactaatatttctgaacttagatcataatcaattcttggggattcctgacgccttttataagcttaaattcctcaaggagatgtacatcgaaggtaaatccggcgtggagtcactacccacccacaaggttctggaagtctcggatgcagactttgcggtatggtaacgccctagacgatttctacctcctttgatctgttaaatctctcggactgacgaaagagaactttcttcaccactaatctatatttctccttaatcaaaaaaaaaaaaaaaaaaaaaaaaaaaaaaaaaaaaaaaaaaaaaaaa

SEQ ID NO: 251 - DNA, 5238 bp, Capsicum annuum
  source 1..5238: mol_type = genomic DNA
atggaaatcgtaactgctattttgagcccagtcgcagaacacttgatgatactgccagttgcgcgacagattggatatttgttttactataggcgcaacatcaggtctttggaaaatgaaaataagaagctggagggtatcagaagcggggtgcagcacagaaaggatgctgaatggagaaacttacaagtcatgccaccccatgtcgagaattggttaaaggatgttaatgaaactactgctgaggtggcggttttactacgacgtagagctgaggttgaaagaggttgcttctacggttggtgtccaaacttgaagtcacgtcactcgctgagcaggaaagctaagaaaattgaacaggctatgattggtcttcaagatgaaggcacacgttatgctccttcctcctgtccagcaccacttgcagttacagtgatacacagtgatgagtttgactctagaaaacagaaggaggaagaggtcatgacagctttgaaagatgaggggatcactattgttgggatatgtggtatgggtggtgttggtaaaacaacactggctgagaaagtaagagcaagggcaaaacaagaaaggttgtttgattatgttgttgtgctaactatcagtcaacaacaaccagacattaaaaaaatacagcgcgagatcgccgaaggagtcggtctatcattagagggggacgatttgttggagcgtggagatcggctgcgttcaaggttaatgcagaaggacagtcgcgtccttgtaattttggatgatgtttggaagaaggttgatctaaagagggttggaattcccagtggtagcgatcgcaactactggtgcaaagtgatattgacgacgcgtctccgagatgtttgtgacgatatggaggctaaaaagaaagtacatgttgaaatcttatgtgaaaatgaagcatggctcctttttaggcagaaagccggtaattcagctgatgatctctctcttcctgatatagcagaagccgttgccaaagaatgcaaggggctgccacttgcaattgttactgttgcaggagcactaaagggtaaaaccaagcgttcatgggaggatgcccttttagaattaaaaaaagcagcaccaagaaatattcgaggagtgcttgcagatgtgtatcaacctctgaagataagctataatcacttagggagtgatgaagccaaggatgcctttttgctttgttccttgtttgaggaagatagtaatatttggactgaagaattacttagatacggaatggggcttggcatcttttcggaactcgaaaatttagaatgtgcaagaaatagggtgtctaatctgttagaaacattgaaaaattgtttcttgttatcccaagttccaggcaaagattatgtcaaaatgcatgatgtggtccgggacatggctatacatattgcatctgagggtaaccatatttttttggtgagccacaatgtgaactcaaaagagttcccaagaaaagactcttacaagcaatacagtcatatgtcaattgttgcaaataaatttgatgcgcgtcccagaccaatatcttgcccacgattgaagcttctgatgttaaaactccgtttcgaagagggtttcaaattacaggatgatttttttgatggaatgagtgaactcagtgtcataaaactgagtggatatgatcgaaactccattctgccctttccatcatccattcagaggttgtcaaatctgagcacgctttggctgagtaatctaaggttggatgacgtgtccattattggggaacttgtcactttagaaattctcagcatcagaggttctgacttacaggagcttccagtggagatcggaaacttggccaatctaactatgttagagtattggaatactggttacagaaaccgtatgaggatttcaccaggggtcttatcaagactagttcgattggaggaactacatatggtgggagtagaagattgtagttactccaccttgagggagctggaatcgttatcgagattgactgcactgacattagatggatgttccaaagatgtgatttacagtaacttgggcctttcctccaagttgacacggtacgctcttaaaatgggtagacactacacgtttacttcattcatgcaaacttacaacaaggctatctatctagacgtcaccaagggcaccccattgggtgattggatccgcctcctgttgaggaatagcgaatgtgtaagttcaagcggaaaggggtccaagaatgtagtgttcgagttgcagaatgtgaaagatctcaggctgtctttttgtgattcattgaatatccactgtcagaataatattccattccccaaacttgaaaggctgaaagtaaatgggtgtgatcatctacggcatcttttttgtgtgtccttggcttgccctgatgaggggacctctcgaaggacacacatcagacctgacgtaatcaagttccccaatttatattacttggaactgggatttctgaaatgcttcacacactttttcagtgacaccgttgagggcattgagttccctctgttacggaaaatgcatttctggagtttacaaaagttccaaaatttctggcctagagtcaacaatgctatcaccgactcaaatcctctttttaatgaaaaggtttcttgtcccaacctggaattgctacgactctgtgaggccaacagcttaactgctctatgctctcaccaacttccaactgcctacttcagcaaacttgtaaccttgaatgtacttaggtgtggaaaactgagaaacttgatgtctccatcagtggccagaggtcttctgaatctccgaatattactattagaagactgtgaatcaatggaagaagtgatcacagaagaggaacaacaaggagatgaaatcatgtgtaatgaacccttatttccccaattggaagagctgggacttgaaaatctgccaaatctgaggcatttcattttgacaaagcaagctcttgaatttccattcctcagagaagtgcagattcgtaactgccctgaaacgaagatatttgtccaacagagatctgtcagtacatcaagtctcaaaagtgtgaacaatgatgatgagttgaaagttgttgatctcaacaaagcgatgtttaattctaaggtttcttgtcccaacctggaagtgctacgactctataaggctaacagcataagtgctctatgctctcaccaacttccaactgcctacttcagcaaacttaaggaactaggagtagggaattgtggaaaattgagacacttgatgtctccatcagtggccagaggtcttctgaatctccgaaaactatggataggagaatgccaatcaatggaagaagtgatcacagaagaggaacaacaaggagatgaaatcatgtgtaatgaacccttatttccccaattggaagagctgggacttgaaaatctgccaaatctgaggcatttcattttgacaaagcaagctcttgaatttccattcctcagagaagtgctgattcgtaactgccctgaaacgaagatatttgtccaacagagatctgtcagtacatcaagtctcaaaagtgtgaacaatgatgatgagttgaaagttgttgatctcaacaaagcgatgtttaattctaaggtttcttgtcccaacctggaagtgctactactctataaggctaacagcataagtgctctatgctctcaccaacttccaactgcctacttcagcaaacttaaggaactaggagtatggaattgtggaaaattgagacacttgatgtctccatcagtggccagaggtcttctgaatctccgaaaactatggatacgagaatgccaatcaatggaagaagtgatcacagaagaggaacaacaaggagatgaaatcatgtgtaatgaacccttatttccccaattggaagagctgggacttgaaaatctgccaaatctgaggcatttcattttgacaaagcaagctcttgaatttccattcctcagagaagtgctgattcgtaactgccctgaaacgaagatatttgtccaacagagatctgtcagtacatcaagtctcaaaagtgtgaacaatgatgatgagttgaaagttgttgatctcaacaaagcgatgtttaattctaaggtttcttgtcccaacctggaagtgctactactctataaggctaacagcataagtgctctatgctctcaccaacttccaactgcctacttcagcaaacttaaggaactaggagtatggaattgtggaaaattgagacacttgatgtctccatcagtggccagaggtcttctgaatctccgaaaactatggatacgagaatgccaatcaatggaagaagtgatcacagaagaggaacaacaaggagatgaaatcatgtgtaatgaacccttatttccccaattggaagagctgggacttgaaaatctgccaaatctgaggcatttcattttgacaaagcaagctcttgaatttccattcctcagagaagtgctgattcgtaactgccctgaaacgaagatatttgtccaacagagatctgtcagtacatcaagtctcaaaagtgtgaacaatgatgatgagttgaaagttgttgatctcaacaaagcgatgtttaattctaaggtttcttgtcccaacctggaaaagctatatatctattcggacataactgctctatactctcaccaacttccaactacctacttcagcaaacttgggacattgaaagtagaaaattgtggaaaattgagacacttgatatctccatcagtggccagaggtcttctgaatctccgaaaactacggataggagaatgccaatcaatggaagaagtgatcacagaagaggaacaacaaggagatgaaatcatgtgtaatgaacccttatttccccaattggaaaagctgaaacttgaaaatctgccaaagctgaggcatttcattttgacgaagcaagctcttgaatttccattcctcaaattagtggtgattcgtaaatgccctgaaatgaagatatttgtccaacatggatatgtgagtacaccaagtcttgaaattgtgaacgatgatgatgaggtaaaagtagatgatttgaacgaatggatacatcagaggttcaattctaaggaagaagatggaagtgaatctgaatcttctcagggagaagattggaatcgaatctga

SEQ ID NO: 252 - DNA, 682 bp, Arabidopsis thaliana
  source 1..682: mol_type = genomic DNA
tacatgtatatatattaatgttatgctattttcgttatgtaaccaaacaaaagagcttttgagttttggtcgtacaaaaaaaaagaaagggaaaatgaagataggacctgtagggaagcatgatgctagaagcactacaattgtaaactgggacgaaggatctcacgatggcttcatctctcagatttttctatctcatggcgtcgctggaattatgtctatccaattccagttcgtgatggacggaaaactcgttttatccgatcgtcacggtccattttccggcaacatgtttgacgttatagagctcaactatccgcatgagtacataactggaatcagtggagagtattacaagtatgaagccaacaatcctcacatgaggtctctcaaattcaataccaacactagcgagtacggtccttttggcacctccggttcgagcaacgacaaatttgcttttaaactcgggaaatctcctcagttcggcggtttccatgggacttatgatgcctcgggactacagtacattggtgtttatctccgcccaaaaacagttctacccaaaatagatacgggcaatgcagaggaaacagagtcaaaaattgtactgggctgaaagtgtttgtatacgactctattctgctgattgtacattcttaattatgaaaattcttctatg

SEQ ID NO: 253 - DNA, 3741 bp, Solanum peruvianum
  source 1..3741: mol_type = genomic DNA
atggctgaaaatgaaattgaggaaatgttagagcacctgagaaggatcaagagtggaggtgatctggattggctcgacatattgcgaattgaggaacttgaaatggtgctaagagtttttagaacctttacaaagtataatgatgttcttttgcctgattccttagtcgaactcacaaagagggccaaattgattggggaaatacttcaccggttgtttggtaggattccacataaatgtaaaactaaccttaatctagaaaggctagaatcacatttgttggaattctttcaaggtaatacggcaagtttaagtcacaattatgagttgaataattttgatctgtcgaaatatatggattgtctggaaaattttctaaatgatgtactgatgatgttcttgcaaaaggataggttcttccattccagagaacaacttgcaaaacatcgatcaataaaggaactgaaaattgttcaaaagaaaataagatttttgaaatacatatatgccccagagataaatggttatgtcgactatgagaagcaggaatgtttggagaatcgaattcagttcatgactaacactgtgggacaatattgtttggcagtattagattatgtcactgagggtaaacttaatgaagaaaatgacaactttagtaaacctccttacctattatcattgattgtgttagtggagctggaaatgaagaagatttttcatggtgaagtaaaggcttcaaagtttactcaatcaaaaactttcaaggacaagaaattaccaaaaggattttcacatcatctccacaatctgttgatgtatctcagaaacaaaaagctcgagaattttcctaataatatcgctgctcaaaatattgatgtggcaatagagttcttgttggttttccttgatgctgatgtgtcaaatcatgttattaatggtaactggttgaaagaggtcttgttaaaagttggagctatagcgggtgatattctatatgtaattcaaaagcttcttcctagatcaataaacaaagatgaaactagcaacataagtctttgctcaatacagatattggagaagactaaagatctgaaggcacaagttgagacgtactacaaatccttaaaatttactccatctcagttccccacctttggtggattgagctttctgaattctcttttaaggaaactgaatgagatgtcgacatctaagtccggattaggtttcctgatgaaacctcttttagggaatttggagaaagagctatcatctcttacatccattttagagaaggagctctcatccattttccgtgatgtcgtgcaccatgaacataacattcctaaagatcttcagaggcgtaccatcaatttgtcatatgaggctgaggttgctattgattctattcttgctcagtataatgcttttttgcatattttttgctcacttcctacaattgtaaaagagatcaagcaaattaatgcagaggtgactgagatgtggtcagcggacattcctcttaatcctcactatgtggctgctccattaaaacatctgccggatcgacatagcaatcttgtaactgatgaggaggtagtgggttttgagaataaagcagaagaactaattgattatctgattagaggtacaaatgagctagacgttgtcccaattgtaggcatgggaggacaagggaaaacgacaattgctagaaagttgtacaataatgacattattgtttctcgctttgatgttcgagcatggtgcatcatttctcaaacgtataatcggagagagttattacaagatattttcagtcaagttacaggttccgacgacaatggagctacggttgatgttcttgccgacatgttgaggagaaaattaatgggaaagagatatctcattgtattggatgatatgtgggattgtatggtatgggatgacttaaggctttcttttccagatgatggaattagaagcagaatagtcgtaacaactcgacttgaagaagtgggtaagcaagtcaagtaccatactgatccttattctcttccattcctcacaacagaagagagttgccaattgttgcagaaaaaagtgtttcaaaaggaagattgcccgcctgaactacaagatgtgagtcaagcagtagcagaaaaatgcaaaggactgcccctagtggttgtcttggtagctggaataatcaaaaaaaggaaaatggaagaatcttggtggaatgaggtgaaagatgctttatttgactatcttgacagtgagttcgaagaatacagtctggcaactatgcagttgagttttgataacttaccccactgtttaaagccttgtcttctttatatgggaatgttttcggaggacgcaagaattccagcatctacattgataagtttatggattgctgaaggattcgtggagaacactgaatctgggagattaatggaagaggaagctgaaggttacttgatggatctcattagcagtaacttggtaatgctttcaaagagaacttataagggtagagtcaaatactgtcaggttcatgatgttgtgcatcacttttgcttggaaaagagtagagaagcaaagtttatgcttgcagtgaagggtcaatatatccattttcaaccttcggattggaagggaactcgagtgagcttcagttttagtgaagagctttccaagtttgcatctctggtctccaaaacacagaagcctttccatcaacacttgaggtcattgataacgaccaatcgagcaaaatctattaatgatattttctcctgtcagattagtgaattgcgacttcttaaagtcttggatttgagttcttatattgtggagtttttgtcgttagctacattcaaaccactaaatcagctgaagtacctcgcagttcaggcttttgaattctattttgatccaggatcacatcttccccatatagaaactttcattgtaatgaatcttccttattatgatatattgttaccagtgtctttttgggaaatgaaaaaattaaggcatgctcattttggtaaggctgaatttgacaagcaggggctctctgaaggatcctctaaattggaaaatttgaggatattaaagaatattgttggatttgatagggtggatgtgttatcaaggaggtgtcctaatcttcaacaacttcaaatcacatattttgggaataatgaagagcctttttgtcccaaattggagaatcttacccagcttcaacaacttcaactttcctttgcgcgtccccgcactctatccgggttacagttgccttcaaatttaaataagttggtacttgaaggaattcatataggatgtgttattcccttcattgcgggactaccaagcctggaatatctccagttacatgatgtgtgttttcctcaatcagaagagtggtgccttggagatatcacgttccataaacttaagttgttgaaactggtaaagttaaatatatcaaggtgggatgtctcagaggaatcatttccgttgcttgaaacactcgttataaagaagtgcattgacctagaggagattccacttagctttgctgatattccaacattggaacagattaaattgattgggtcctggaaagtatctctggaggattcagctgtgagaatgaaggaagaaatcaaagacactgaaggatgtgatcgtttacacctcgtcaaacaacgctcagattga

SEQ ID NO: 254 - DNA, 7158 bp, Nicotiana glutinosa
  source 1..7158: mol_type = genomic DNA
attttttcacatacagtttcttactcttttcagagaattaacgttgagtccatggcatcttcttcttcttcttctagatggagctatgatgttttcttaagttttagaggcgaagatactcgaaaaacgtttacaagtcacttatacgaagtcttgaatgataagggaataaaaacctttcaagatgataaaaggctagagtacggcgcaaccatcccaggtgaactctgtaaagctatagaagagtctcaatttgccattgttgttttctcagagaattatgcaacatcaaggtggtgtttgaatgaactagtgaagatcatggaatgcaaaactcgatttaagcaaactgttataccgatattctatgatgtggatccatcacatgttcggaaccaaaaggagagctttgcaaaagcctttgaagaacatgaaacaaagtataaggatgatgttgagggaatacaaagatggaggattgctttaaatgaagcggccaatctcaaaggctcctgtgataatcgtgacaagtgagttaaaaacatataagctgaatactttgcattcaaatgagttaaacataatcttaaataaatttttcaattttttggaataaattgatagttgattatatatgtttctatcagttaattacaaactcaataacattattacgtagataaaatttttattagttcttcaaagagtttgatttatgtgcacactctttgtatatatcacaatctttttacttttgtaggactgatgcagactgtattcgacagattgttgaccaaatctcatccaaattatgcaagatttctttatcttatttgcaaaacattgttggaatagatactcatttagagaaaatagaatccttactagagataggaatcaatggtgttcggattatggggatctggggaatggggggagtcggtaaaacaacaatagcaagagctatatttgatactcttttaggaagaatggatagttcctatcaatttgatggtgcttgtttccttaaggatattaaagaaaacaaacgtggaatgcattctttgcaaaatgcccttctctctgaacttttaagggaaaaagctaattacaataatgaggaggatggaaagcaccaaatggctagtagacttcgttcgaagaaggtcctaattgtgcttgatgatatagataataaagatcattatttggagtatttagcaggtgatcttgattggtttggtaatggtagtagaattattataacaactagagacaagcatttgatagagaagaatgatataatatatgaggtgactgcactacccgatcatgaatccattcaattgttcaaacaacatgctttcggaaaagaagttccaaatgagaattttgagaagctttcattagaggtagtaaattatgctaaaggccttcctttagccctcaaagtgtggggttctttgctgcataacctacgattaactgaatggaaaagtgctatagagcacatgaaaaataactcttattctggaattattgataagctcaaaataagttatgatggattagagcccaaacaacaagagatgtttttagatatagcatgcttcttgcgaggggaagaaaaagattacatcctacaaatccttgagagttgtcatattggagctgaatacgggttacgtattttaattgacaaatctcttgtgttcatctctgaatataatcaggttcaaatgcatgacttaatacaggatatgggtaaatatatagtgaattttcaaaaagatcccggagaacgtagcagattatggctcgccaaggaagtcgaagaagtgatgagcaacaacacagtaagtaagctaaataatgcaataatatttaatttctaattttatattctaaagacacatagggcagtcaattccagttatttgttcctcttgcttcatagtcttgacggtacatcattttagttgtttactttagttagtaggagatataaaagtaatattaattacctcattagtaaaaaaaaacattaattgcctaatttgtttagtagccgctttaatttacgttccctaattcgttttttcttatattttttagggatggattagtctagtagccacttaatctgtttgatccaatgtctttctttggattaacttgaaaattttatgacattatatataataactcaatcattcattcactttaccattattattttttatataaagttacaatttattggtactgtttcagttacaattactttccaacatggaaaacttataaactggactccaataaacttataagaaaaatgtaataatagaaaataaaattatataattaattacaaaaaagtatttttctgaagtaacatcagtatttcttaaaaagaatccaattaacattgtatcttaaactttggtattgtaaggcgtgagaaagtagtggccttatttcaatttgacgtgaagaatagaatgccttttaacgacataagggaagggggcaagaataagtttctattcagccgggctcgaagcagaaggtagaacgtaatatcttttgttggttcagctcatcaagctattacaaaagagtccgctcatattaacaaacggagtttatacgacatttgaaattatactttgtagactaatgatcttcttgttaccaggggaccatggcaatggaagcaatttgggtttcttcttattctagtactctacgctttagcaatcaggccgtgaaaaatatgaaaaggcttagggtatttaacatggggaggtcgtcgacacattatgccatcgattatctgcccaacaacttgcgttgttttgtttgcactaactatccttgggagtcatttccatctacatttgaactcaaaatgcttgttcacctccaactccgacacaattctctgcgtcatttatggacagaaacaaaggtacaatagcttgaattctattttgttgtcatttatttttctctctaactatctttgtcctttaatttggtgataatgaacaaatattattgttttttgttatgaaacaataaaagaagaagaacaatattgcagagaaagagggagatggaattcttattgaattttggggcgatttacaatggggtaagacccctctatttacaggggaaaaataacttagcctcaaaataaagctctttaaaagatagacattcactctaaatagaattctattataacacttttggcgtacttccttttttggctagaattatgatacatgtctttaaatgaacagaagttgcttttgtaatttatcaggacttatgttgaaacttatgaaaattgttattgtttatgttgtctaatactaaatataaaatacaataatattttatcgtaattttttaaaaatttgtcaaataatgcaaatgaaaaattaaattttttggtcctttaaaaatttgagaatgaaaaagtacgagttatacttcctaaaagtttgatagtgaataatatgtaaaatttaaagaatgactaatattggactaatactttaaaacaaataacttaatatacaaattatagcgagacattttcattcgttgtactgaatgcaagaaagaaaggaaaaaaaaactcatttataatatagtttgtcttctactattttaccttattgcttcaaatttgtattttatcgattttgctatatcttatgatttttttcacggtcaatattcttcttacaagaataaattttatatacctcaagtgttttgtcaatttgataaataatttttcttatatgatgaacttgtaaaataatagaattggattcttttgctaattagttaattcaacgacttaattatttattctcaacattaaaggaaataatttagtttttattaattcaaactcttagtatttgctcattctaattttcagtccaataagaattcaattttcaaatagtaagaaaagtcatatattttgaattttatgttttccgaagcattgtttgtttgtttaactctacgggagttttctaactcacattttgtataataaaattttttgagtagtagttcagtacaactctaatattaatgggctttaaataaggaaatatatattacgtaaaaatttaaatcattttaaagttctttcctaccaagtaaataagggaaaatttaataacaaaaatttagttgattttaaaatcctaaatattagaaaattaacttaaaatataatttcgtctagtgtaaaatttatttttaaagggtaaaaaagacgaacgacattaagagcctttgtaattttaatatagtataaatataaataatttacctttattcagtttcttaacaagtaattttccatatataaaaaataaatttctatattcacacaaaaataatgtgttggccctcgtaattcaaatactatcattcatttcttgtcgagggagtagtaaatacttttaggaaagttagcaataagtaatcaagaaatcaagaaaacagaggtcatttgatgcccacaaatacaaatgaaaaaacaaaacaaatgttacgaaacaataaaagaacaagaatagcctcaaagtaaaactctctgatagacatttactctaaatagaattctatttataacaatcaaaaagtttctacatttatagatagctccactagccaaatattttattattggaatcagcaaaataggttgtttctttttttattctcattctgtctgtgttctaaacagcatttgccgtctctacggaggatagatctcagctggtctaaaagattgacgcgaacaccagatttcacggggatgccaaatttggagtatgtgaatttgtatcaatgtagtaatcttgaagaagttcaccattccctgggatgttgcagcaaagtcattggtttatatttgaatgattgtaaaagccttaagaggtttccatgtgttaacgtggaatctcttgaatatctgggtctaagaagttgcgatagtttagagaaattgccagaaatctacgggagaatgaagccggagatacagattcacatgcaaggctctgggataagggaactaccatcatctatttttcagtacaaaactcatgttaccaagctattgttgtggaatatgaaaaaccttgtagctcttccaagcagcatatgtaggttgaaaagtttggttagtctgagtgtgtcgggttgctcaaaacttgaaagcttgccagaagagataggggatttagacaacttacgggtgtttgatgccagtgatactctaattttacgacctccgtcttccatcatacgcttgaacaaacttataatcttgatgtttcgaggcttcaaagatggagtgcactttgagttccctcctgtggctgaaggattacactcattggaatatctgaatctcagttactgcaatctaatagatggaggacttccggaagagattggatccttatcctctttgaaaaagttggatctcagtagaaataattttgagcatttgccttcaagtatagcccaacttggtgctcttcaatccttagacttaaaagattgccagaggcttacacagctaccagaacttcccccagaattaaatgaattgcatgtagattgtcatatggctctgaaatttatccattatttagtaacaaagagaaagaaactacatagagtgaaacttgatgatgcacacaatgatactatgtacaatttgtttgcatataccatgtttcagaatatctcttccatgaggcatgacatctctgcttcagattccttgtcactaacagtatttaccggtcaaccgtatcctgaaaagatcccgagttggttccaccatcagggttgggatagtagtgtatcagtcaatttgcctgaaaattggtatatacctgataaattcttgggatttgctgtatgttactctcgtagcttaattgacacaacagctcacttgattcccgtatgtgatgacaagatgtcgcgcatgacccagaaacttgccttatcagaatgtgatacagaatcatccaactattcagaatgggatatacattttttctttgtaccttttgctggcttatgggatacatctaaggcaaatggaaaaacaccaaatgattatgggattattaggctatctttttctggagaagagaagatgtatggacttcgtttgttgtataaagaaggaccagaggttaatgccttgttacaaatgagggaaaatagcaatgaaccaacagaacattccactgggataaggaggactcaatataacaacagaacttccttttatgtaagtctctacttctattagctacaaagtcttcttccaaaatcaatactccatccgttccagtttatgtgaacctattttttgttcgtccattctaaaaagaatgacccctttctaaatttggaaataattttggttaaacttataattctaccattaacgagaagcttttataaccacacaaatattctggggccctttttgaattgtttaggaccataaattccaaaagtcctcattttttcttaaactccgtgcccaatcaaacaagttcacgtaaattggaacggagggaatatattttttcttctcattcttttcccctatttacaggagctcatcaatgggtgatgtacatatcaacaacgagttttaaaggattccaacaagtataactttttatgctcaaatcagctccttgtattgtggagaaagctgagtacgagatgaagttgacgtccgttatcctttatgatctctctgttctttgtgttaacttgcctacttcatcagatgaataacagaagcccgttcctctcattctcaacactgtttgcacgtctgttgttacttgttaaaatggatcttgataaagtaataacatctctatattacttataagtggttttaacaagttcactcttttgcttttgcagttcaaatgggaacacaatgtatattgagaactagaacaatgacactgcatatatatatatatatgtatgtatgtaattctcgtcttttggactagaataccttgtttcattatgaaatgaattaacatcttcgcctttgctgac

SEQ ID NO: 255 - DNA, 9837 bp, Solanum lycopersicum
  source 1..9837: mol_type = genomic DNA
ggatccttctcatttttagattacaagttctatactcttgttctttatagaatatttcaattgtgaattgtaatagttgaaataagttctaagtttaataaaatttgaggaaataattcatcaattaacactcatattttctttctactattttcatcacatacatacttcaaagatatatcattttataatatcaattctaattagcatgagaacacgtgcaagagacacgtgttcaacaactaatattactaaaagtgggaacaaaaaaaattaaaatatcaaaatcatattttatttagttatttaaaggtaattttatttttattcatgatatagtgatgttcatattataatactattattgattactttcttttagggggtaaattgtatggcatggaaaaaaaatattttcagagatgatgattcttttatcattagaaaacttatattagattatttatacttgtatactcgggttagaagttttgtgttctatgagtttctttaatcatgtttgtaattatttcaaagtattgatatatttttataattttgttttactatgttattatataatattgtagagaaaatgatcaaatgccccctcaacgtataactggatttccaactacacacttaaactttacgagagtcctatcacccccctgaactatttaaaaatgaaataattatacccttaaaaaagtcataaccagatctattttcacgtgtttgacacgacatcaaattattattatttttagggataatgcccaagtaccccctcaacctatgcccgaaatttcagagacacacttatactatactaaggtcctattacccccctgaacttattttattaataattttttactcctttttagcctacgtggcactatcttgggggcccaacgatggttgactttttttttcaaactagtgccacgtaagctaaaaaggggtaaaaaaaattacttataaaataagttcaggggggtaataggaccttagtatagtataagtgtgtctctgggatttcgggcataggttgagagggtacttgtgcattttctcttatttttaccatcactagaacaccataagtccattattgggtctttgaggaagaaaagtgaataataatttatagctcgttcagagatatttgaattttgctcatttgatacctaaaattaactttaaaaaagtgagggggggaggtggggggttagaagacgaatattgtcattaatgatggtcaccgaagataaacaatgctctcaaggaagatgaggaggagcaacctatgatgtctgccacatcatcttctatggcgacaacaatttcaaatagggagagagattctacgatatttgatggattaactagattaatagctaaaattttgtagatataattgattgattgagatttgatattctattagtaaaaaaaatatttttttggttggtccaatcggagtcaaagtaaaacccatattgattttctcaaattaggtccaaagtatcctgaggtaatataaatatatgtaaatttatctcaattgattttggatgattggtaatcaagagttttatatgagttcgaaaatttattttgaatcagaaatagtcaatccggtgaagatattgatggcaacaagacttagaggtggtgaaagattgagagatttgttaataaggaaagggccaaaaataccctctaactttaatttattgattgactttatcccatccgttaaaatgaagttatttataccctcgcctttaacaaacttgtcatttctaccctccaaattaacggttgccctaaattgaccccaaatcccaatttcaatttaaattacccatttgaaattgatttcctcttttaaaccggacccaataaacttaataacattggtgaaacttcaaactttcttcccaattttgtcaaaaacagagattttacacaataatatacaactcaatatacataaaccaacaaaaatgaaaatgcaccattagaggaattgaatagctattgccatggtacaaatcgtttctacatagatgataccaaataaatgagagaacaccattacattatttggtgctgttttcttgtactccgacaacccacaacccttgagcgatcccaatggtgacaaacacaactgaagaacttcttgcagatgcacattatctccgggcaacgatgacgatcaaaaagcaagaggacgaaacccttctgcctcaatgtttcacctcttcttctgcaccatattttcttcgatattccctactttcaatcttttaatttttcgccattgatttgaaccaatagcccccaatatttcaattttttgatcttggaaaaccatgttggtaattggtagaagacagcatcgttcaaatcgatttgtgtcgattcgttggaatcagaggaaaagtagtaagaatggaacgtaccagttcgtcggaaccggaggaatattaataaaagagaagaaagtgaacgaagagagttatccttaattgagatgattctggtaacttttttgtgacgattctggtaacctttgatggagaaataagaagtcattgttcaagttattgagagagaaagaggagatgctttgttgttatttgtttactataatgggtcaggttggattgagtttgggtaataaatgatatggcaattttatttgaaattgggatgatttttattgatttgaggctttccctctaaagaagggtacatatgacaagtttttttcaacggtaaggatataaataacttttttttaatggtaagggtaaagttaaccagtaaatcaaagttgatgaagaagaaagattacaaataagaaaaataaataattgaaaatgcatatatttattgaaagagatattaaaaataaagttttagtaatagattttgatgttcactctccaaagagagtgaaatacactaactatgccagctaagcattcagggaggtaattatttcagttttaaatagtacagagggtaataggactcccgtgaagtttaattgtgtagttgaaaatccaaaaatacattgaggtgacattcaatcattttctaaatattaaaaatttaaagatccataaggggcttacaccctactcatggcttacgtcttgccttttactaagtaaattgtccaagagttgctcaagcatattagtggcctaaagcaaaaatcacttattaataatttttatataattgatttcttctagatttcaattgataataataccattgttattttaaattatttttcatgagatataatattccaaatatgtcaaatttcttttaataattccttcatttcatctaataattccttcatttcatgaaaagtttactttttatacaaataatattcaatattttttttaaaaaaatactccttataacctattattattaaatatgaaacccttaagttttggggtctaagacacatgtctttttttagcactgtcgagtcacctctaaaattgtctcgccttacgcgcgtgttcgttaaaacactgcgcagaatgattattataaaaggaagtgttatttgtagttttgatgatgtgacaaactcagagaccttgtaaaggtaccaggttctcaacatgagttttgatgatgtgatatactcaggaaccttgtaaaggtaccaggttcccaacatgaatagcctgttgactgccagccggagaaggtacagaatgggtgcacatttaccaatggcgtgagaaaagtcagaccttttcaacaaatggcaagagtttaaggaaagggacttgtctatacaatgtcactttcctaaacatcattccttagtttttgcaacttgaaaaagtactctcacgaacatttgcaaaggctatagaaaatccaagtgaagaattattcaaataacaactgaaaattcagaagcatatcgtgtagttgtttgagaatatattcttgtggtcttacattgtaaactgttcctaaatctataaaggaatcagtgtggtggtgttgaaattctaagttgtcttgaagggatagcttagtgggtagaataacttctacttatgcttatcaagcaaaagagttattgcttgatcgtgagattaaaaactttctctcacatttgtgtaactggttttacttttacttgcgaattttagtgaaacagttgtgaaaatcctgtgagacaggtcgtggttttactctcttaagcaaggaggtttccatgtaaaattattgtgttgtcaagctgcatttactttctgtttatactttgtgtgtcaagggacctggtccattgactgataagtagacgcataaattctaacagtaagatacttctcctttttctttaatacaagtaatgtaatttatctctaagaaaatataaaagttcaacaaatgaaagggcaagtatgaaaaaaataataatacaaacttacctcttcaattttaaacaatgattggtataaaaagatgctgccccacgttgtctctctctttcttttttatcgttcacatttttaggaaacttgggctacagcaaaagcaaaagtcattactatactcatttttttgtagctacttaaaaaagagaagaaaaaaatggctgaaattcttcttacatcagtaatcaatgaatctgtaaaaatagctggaaatctactgattcaagaaggaacacgtttattttggttgaaagaggacatcgattggctccagagagaaatgagacacattcgatcatatgtttgacaacgcaaaggcctaggaagttggaggtgattcaagggtcagaaacttattaaaagatattcaagaattggcaggtgatgtggaggacctcttagaacgtatagaactttaattacgtaatcaatttttgttgtttgattttatagatttagacaatatatatataattatttatcgttcaacaaagaagacgattgtgtattcgggttgttcatgaatttcaacttttactatttcattttgaattttttggttagtcatttctatcaatttgcttaggacacctgtgcggaattgttatactactccctttatttcatattacttgaatttgtgaggcaatgcctatatatattaagaaaaatattcaaggacataatttaaatcatgattctattattttcctttgtggaatcataaatataactttgtaagtagtttaatttatctcctaaagcgtacagaacttcaataaataaaaggacaaatatggaaagaatttcaaacatccttcttaaactttgaacaattcaattattatgaacaatgcaaaaacttcaaaaattcactttaatataaaataaaggtaatataatataacatgattttttttttaaaaaagaaaaacatatttgttacatatcactgttgggactcgtcctagggcaaaactctggcaaaacgcctcgagactgaactttgggtcttagttcggtaagaatcacgccctaaactgcagattgtacgtcctaagtacgcccaacacccaacgttcggggctcgactaacatatcttatacaaagtaattatgtgttaaaatctgtatagttaacatttttgaccctcatagttcttgaataaatgaatgatacttaataatttttaaatctgtagagataatagtaactcaaataattagttgtagtatcacatttttactattttataacaatgtaaagatgataatataatatgtaacatttctttcaaaacatatagcaaatttttactttttcttgcttattattgattttcttggttttgtcatttgtgtcaaaactatcctattttatttaactatttgaaaataattttattttgattcatgatatagtgatatttttattataataatattattgattattttcttttagggggtaaaaattttaacatcgatagggcgctcaaagcttacgccttgtacttaaagacgcccccttgacaagactgcagcgagtgattgtcatagaaaaaagaaatttctcctttttcattaatgtgcagctgccccacgttgtcactccccttcttctttatcatttccttcttgacattattaggagacttggccgtggactccatctaccactaaaaagctaaagccatcagtatactcattttttggtagctactgaaaaagagagaaaaaaaaatggctgaaattcttcttacatcagtaatcaataaatctgtagaaatagctggaaatttactgattcaagaaggaaagcgtttatattggttgaaagaggatatcgattggctccagagagaaatgagacacattcgatcttatgttgacaacgcaaaggccaaggaagctggaggtgattcaagggtcaaaaacttattgaaagatattcaagaattggcaggtgatgtggaggatctcttagatgacttccttccaaaaattcaacaatccaataagttcaattattgccttaagaggagttcttttgcagatgagtttgctatggagattgagaagataaagagaagggttgttgacattgaccgaataaggaaaacttacaacatcatagatacagataacaataatgatgattgtgttctgctggatcggagaagattattcctacatgctgatgaaacagagatcatcggtttggatgatgacttcaatatgctacaagccaaattacttaatcaagatttgcattatggagttgtttccatagttggcatgcccggtctggggaaaacaactcttgccaagaaactttataggctcattcgtgatcaatttgagtgttctggactggtctacgtttcacaacagccaagagcgagtgaaatcttacttgacattgccaaacaaattggactgacggaacagaaaatgaaggaaaatttggaggacaacctgcgatcactcttgaaaataaaaaggtatgttatcctcctagatgacatttgggatgtggaaatttgggatgatctgaaacttgtccttcctgaatgtgattcaaaagtcggcagtagaatgataatcacgtctcgaaatagtaatgtaggcagatacataggaggggaatcctccctccatgcattgcaacccctagaatccgagaaaagctttgaactctttaccaagaaaatctttaattttgatgataataatagttgggccaatgcttcacctgacttggtgaatattggtagaaatatagttgggagatgtggaggtataccgctagccatagtggtgactgcaggcatgttaagggcaagagaaagaacagaacatgcgtggaacagagtacttgagagtatgggccataaagttcaagatggatgtgctaaggtattggctctcagttacaatgatttacctattgcctcaaggccatgtttcttgtactttggcctttaccccgaggaccatgaaattcgtgcttttgatttgataaatatgtggattgctgagaagtttatagtagtaaatagtggtaataggcgagaggctgaggatttggcggaggacgtcctaaatgatttggtttctagaaacttgattcaacttgccaaaaggacatataatggaagaatttcaagttgtcgcatacatgacttgttacatagtttgtgtgtggacttggctaaggaaagtaacttctttcacaccgcgcatgatgcatttggtgatcccggcaatgttgctaggctccgaaggattacattctactctgacaatgtcatgattgagttcttccgttcaaatcctaagcttgagaagcttcgtgtacttttctgtttcgcaaaagacccttccatattttctcatatggcttattttgacttcaaattgttgcacacattggttgtagtcatgtctcaaagttttcaagcatatgtcactatcccaagcaaatttgggaacatgacttgcttacgctatctgagattggaggggaatatttgtggaaaactgccaaatagtattgtcaagctcacacgtctagagaccatagacattgatcgacgtagcctcattcaacctccttctggtgtttgggagtctaaacatttgagacatctttgttatagagattatggacaagcatgtaacagttgcttttctataagctcattttacccaaatatttactcattgcatcctaacaatctacaaaccttgatgtggatacctgataaattttttgaaccgaggttgttgcaccgattgatcaatttaagaaaactgggtatactgggagtgtccaattctaccgttaagatgttatcaatatttagccctgtgcttaaggcgctggaggttctgaagctcagtttttccagtgacccgagtgaacaaataaagttgtcatcgtatccacatattgctaagttgcatttgaatgttaacagaacaatggccttgaactctcaatcatttcctccaaatctcatcaagcttactctagcctactttagtgtagaccgttatatactggcagtacttaagacatttcccaaattaagaaaacttaaaatgttcatctgcaagtataatgaagaaaagatggatctctcgggcgaggcaaatggttatagctttccgcaacttgaagttttgcatattcatagcccgaatgggttgtctgaagtaacgtgcacggatgatgtcagtatgcccaaattgaaaaagctgttacttacaggattccattgccgaatcagtttatcggaacggcttaaaaagctgagtaaatgaacatctcaacaggtcagtttgctagtataactatttacgtacaggggtgcatcacagcaacgtgagtgtagtagtgttgtttcttgttgtggttgtttgttggttgttcagatctgaaagtgtgaagctcattagaacacgtctcatagtgatattaaatttacttttaaacaataaaggcgtgtaataagtcattgtaataattaaatcatgtaactgatttttcacgagagaaaatttatgtcattttcctttgtaaagataaagtagtcattggttccaattgtaagattaaatacttgaatacataatatcaggattttgaacacgataatcttacatagaaatcattaggggaacatacctgatgaggaagacatcttcacacacaaaaacgaaagtgttagtcgtaaattgatttctacctccttttcctaactttatgttaccacaatcgtcagcgatagaattattctagagaatatgtggttaactctagtgggtggagggaggaccaattcatagaggttgtgatttaatctgatacgtccatcaattaaccaatgtacggacgagatctattacttaataaatattatttatgatattacttggattacgactaaacttgggtcataagtaagaaataattaataataattcttacagtctcccacttggcccaataaccatatatcattaatatttaataaatattagttgcgcatacaatagatctcttctataatgtcaatcatgcataccacaatatgacaaactactaatgcgagttttgacggttgcacataaattttaagctacatacttccttccatatactactacattagcaacttatcatactaggttcataaggtataaaaacatataacattacggtccacaataatgcctcatataaactcatcttgtaatttctcaaaacaataatgtgtacaccattacgagaaacaagatgttcagaaacacataatttgagctc

SEQ ID NO: 256 - DNA, 3947 bp, Capsicum chacoense
  source 1..3947: mol_type = genomic DNA
tggtggtgcatttctgtcttcagctttgaatgttctctttgataggcttgctcctcatggtgatctgctcaacatgtttcagaagaataagaatgatgttcgactcttaaagaagctgaaaatgactttggtcggccttcaggttgtgttaagtgatgcagagaataagcaggcatcaaatcaacatgtgagccagtggcttaatgaacttcgaggtgctgtggacggtgctgaaaacttaatggaacaagtcaattatgaggctttgaggcttaaggtggaaggtcggcatcaaaatcttgcagaaacaaacaaccagcaagtaagtgacctcaaactgaacttgagtgatgattattttctcgacataaaggagaagttggaagaaaccattgaaacattggaggatttgcaaaagcaaatcggtgaccttggcttacagaagcatttagatttgggtaagaaactagaaactagaacaccttcaacttctttggtcgatgaatctaaaatccttggtagaatgattgaaaaagagagattgattgaccgtttattgtcaagtgattcaaatggagaaaatctgactgttgtccctattgttggaatggggggcgtgggcaagacaacacttgctaaaattgtttacaacgataagaaggtgaaagatcattttggcttgaaagcttggttttgtgtttcggaggcatatgatgctttcagaataacaaaaggattacttcaagaaattggatcattcgacttaaaggatgacaacaatcttaatcagctacaggtaaaattgaaggaaagcctaaagggaaaaagatttcttgttgtccttgatgacttgtggaatgatgactgtgatgagtgggatgacttgaaaaatctttttgtacaaggagctatgggaagtaagatccttgtgacgacacgtaaggaggatgttgccttgatgatgggtaatggggcaatcaatgtgaagactctgtctgatgaagtctcttgggatctattcaaacagcattcattaaaaaacagggatccggaggaacatccagaacttgaagaggttggaaagcaaattgcagacaagtgcaaaggattgcctttagctctaaaggcacttgctggtattttatgccgcaaatcagaggtgtacgagtggaaaaacgtcttaagaagtgaaatatgggagctgccaaggcgtaagaatggtatattaccagagttgatgatgagctacaatgatcttcctgcacatttgaagcgatgttttgctttttgtgcaatatatcccaaagattataaattttgcaaagagcaagttattcacctgtggattgctaatggtctggtacaacagttgcattctggtaaccaatactttaatgagttgagatcaagatcattgttcgaaagggtcccagagtcttctgaaagatacggagggaaattcttaatgcatgatcttgtcaatgatttggcccaaattgcatcttcaaaactttgtgtcaggttggaagagtgccaaggatctcatatattggaacaaagtcggcacacgtcgtattcaatggggagagatggtgactttgagaaattgaaaccgctctctaagtcagagcagctgaggacattgcttccaatctctatccagttcctttaccgccctaaactaagcaagagggtgctgcataacatattgccaagactaacttacttaagggcattatcattgtcatgttatgcgattgtggagcttccaaaagatttgtttatcaaatttaagctcctgagatttttggacctttctcggacagagattacaaaattgcccgattctatctgtgcgttgtataacttggagacacttctcctgtcatcttgtgatgatcttgaggagctaccgcttcagatggagaagttgatcaacttgcggcaccttgacatcagcaacacttctcgcttgaagatgccgctacatctgagcaagttgaaaagcctccaagtgctagtgggagccaagtttctactaggtggcccctgtggttggagaatggaagatttgggtgaagcacattacatgtatggatctctatcaattttagaattgcaaaatgtggttgatagaagggaagctcagaaggcgaagatgagggataagaagaagaatcatgttgagaagttatcgttggagtggagtggaagtgatgcggacaattcacaaaccgaaagagacatacttgatgagctacgtccacacacaaaaataaaagaagtcgaaatctccggatatagagggacacagtttccaaattggctagctgatgattcgtttcttaagctgctagtacaattgtctcttagcaactgcaaggactgtttttccttgccagcactaggacagcttccttgtttgaaattcctttccattagaaagatgcatcgaataacagaggtgatggaagaattctatggtagtccgtcctctgaaaagccttttaacactcttgagaagcttgaatttgcagagatgcctgagtggaagcagtggcacgtactagggaacggagagtttcctgcacttcgggacctttcaattgaagattgccccaagttggttggaaatttcctcgagaatctttgttctctgacgaaattgagaatctcaatatgtcctgaactcaatttggagacacccatccaactttcaagtctaaaatggtttgaagtttctggttcttttaaggctggatttatttttgatgaagctgaactgttcaccttaaatattttgaattgcaactctcttacctccttgcctactagcactctgccgagtacgttgaagacaatatggatatgtcgttgccggaaattgaaattggaggcaccagatagtagtaggatgatttctgacatgtttctggaggaattgagactggaggaatgtgattctgtatcatcaactgagttggtcccaagagcacgcactttgactgtgaagaggtgccaaaaccttactaggtttttgattcctaatgggactgaaagactcgatatttggggttgtgagaatcttgaaatattttcggtggcatgtgggacccagatgacgtttttgaatatccactcttgcgcaaagctgaagcggctgccagaatgtatgcaggaactccttccatctcttaaggaactgcatctgtggaattgtccagaaatagaatcctttcctgatggaggattgcccttcaatttacaactcctcgtgatcaactattgcgagaaactggtgaacagtcgaaaggagtggcgtctacagagactccattctctcagagagttgttcatccgccacgatggcagtgacgaagagattgttggtggtgagaattgggagttgcctttctctattcaaaggcttaccatagacaatctgaaaacattaagcagccaacttctcaaaagcctcacctctcttgaaactctagattttcgtaatttacctcaaattcggtcactgctagaacaagggcttccctcctctttttctaagctatatttatacagccatgatgagctccattcactacaaggtcttcagcacctcaattcggttcaaagtctattgatctggaattgccctaatctccaatctcttgcagaatcagcgttgccctcctccctctctaagttgaccatcagggattgccctaatctccaatcccttcccaaatcagcatttccctcctccctctctgagctgaccatcgagaattgccctaatctccaatcccttccagtaaaagggatgccctcttccctctctatactatctatttgcaaatgcccatttctcgaaccactcctagaatttgacaagggggagtactggccagaaattgctcatattcctgaaatatatatcggtcgcactatgt

SEQ ID NO: 257 - DNA, 18284 bp, Solanum tuberosum
  source 1..18284: mol_type = genomic DNA
tgcgcaattcttactgttttataccttttctccctctcttcctctccatcattttcagccttatggatattattgttatgttcctcatgagtatcaacatgcatattcttttctccaaattgttgttcatctcttacaatattattatcataaatttcaccaacattcgtatgatttcggccatttgcttctagaccttttatcgatttctccctttgtattttttctctcaatacaagttgccataagtatttcacaatttccttgttgaatggattttccaagcaaaaataagctccattttccaaagcgttcttggctaagagtctattgagtttatcacctacaactgcataattatattgagaagttaaaaattaaaattaaattatatcatacattatgagaatagttaatttcacacatatatttactgaattttatctgttatgacaacaactttgttatgaaacaatcatttatcatataactataactaaaaacaagattaacaatggatagatgtcgtctcttgacaatagattaacgataaattttatagctaattatatttttgtggtgtattaattgaaacaactgactttacccaatatttataacaagaagtgaaaaatagaattataaatacttaccaagagagattatatttaaggttacagcttgtgtcaagagttcaaaacaatgtaaatctgatgaattgacatcgattatcatcatgtcaatttttttcttttctttggagagcattgacattgccgcaggagtcgtaactgtcgtaactgtatatatccatacattttaaagttaaagttagtgaagaacatgaaaaaaatattatacacaaagttatcatttggatatgtttatttaatttctcattcaaattcaattatgaaatttcatattatgttgctatactttaatttatgaaataacacatattaatcaacttatatcgtaaacggtgtgtgtaatgacccgaaaggtcattttggtaatttttcgtggaaatgactattttgccctttcggtagttgccccgagtcccatgttttatggttgtaaagttagtttgaggaaaagttggtaaaaagttgagtttttgagaagttgagtttttatgagttaaagttggttaaaaagtgctttttcgagttatttggagtttcgggactcggattgaatttccgtcgattccggcaattttagaatgtcgaaacgggtctgtgtgaagttacggagttgaatttggagttgaaacgaagaattgaggtcctaagttgctaaagttgtgaaattgtgataaagagttgactttggtcaacatatgaggttccgaggctcggattgaaattccgaaagtaccgttggtttcgggaggcgattctaagtctagaatgagtcttggttgaatttttagacgctctgtttgagtttcgaattttttttgcgttaaactagtttcttggcatcttattgaatttcgggtcaaggagtcctcgaattcaaattccgacggttccattgagtccggaacgtcgaatttagtgggggtacatatttagtttgtgtgcacgagattccgaacgaatcccgagggtccaacggggacttaaactttggtgttattgttgtgtttcagctgcaatagcagtcctttttaagtcaaaaaacagtagccattttcccccaacttgaaaaatatccatttctacatttttagactttgagagctcgaaaataggtgatttcaagtgggttttcacaaggaattcattgggtaagttatttccaacttatatctttgatttccatcgattatttatggattttaacatcaaaatttgagatcccaactgaaaaatttgggggtttttgcctagtccgaatttaatagaaaatttgagtttgtgaactcatttcaactcctttttcgaaacggttttcactattggattctaaatttcttggggaacatttttcactaaaaatttccagatttcgagaatattttttcggaacgagttttttttgaccattttacccttttctccaaatttcacgatattggtgttgttagattcgtattgattgtgagattccatttatgaatagattgtggtgatttggagcgtgctcgaaagggtaaaactcaaatttgagttactagttgaagtgttttgaggcaagtgacttctaaactttgttaaactcttagactacacatgactactttcctaattgtgttggggagtaatggggattgaggatgggttttatttgttgattgaaattgttgtaaatgaaagatggggaataaaacgagctaagtgtgttatatgtgacttgaatttgttgaataagtcatgtgataaccgatattgaggggatagaagagcatgagtaagctatgattgatacagacattgatgttgagacagatgatgtgtaatactatgatatggttgtgattgagacagacgatgtgtaatactatgatgtggtcgcgatatggttgtgattgagacagataatctgtaatactatgatgtgatcgtgatatgattgtgattgatgacatgtgcatattcattattcatctcatgtgtgaactatctgttgcatgagttctgagacactgatatgaggatggatggctatgagacacagttgagactagctccggctagagatatatgagatggactagctccggctagcgatttggatgccgatgggatctggttccggcggtgatacatggtccatgtgtggcccccatgggttctgatttgagtattcagcgcggactgattacgtcaacagatatgtatcgtaggacagacatgcatcatgactatatgacattattattgcatttgcatcgcatttgacttcatctttgtctgtggtgtgtggagtttacctatttgcccctcttcatgtgatatatgatctatttgctcttacatgaggatatgaggttgatgttgagacactgttggatatatctgttgattatgaattgtgtagtataggttgttggttcgctgttagaatgaagtctcggtggttcggttgggattgaaaggagttgtttgtagctgctagtttagcttagtttagtgttacttgcgagtacctgttgcttttggtactcacccttgcttctacacagtggtgtaggttgacagctctatcagattcgacttattactcatcttcaaattagagcttccagacttacttgagaggtagcggttcattccagacgtgccctcaagttatctatatttattgttttgttctattatagaactttactatgagacttgtatattttattcagattccgtactagaggtttgtacatgtgacaaccaattctggggtttcattgagtttatttaaagacttccgcttatctttctatcttattcttgttttattaattccgtatcgtcgggtttttgggtgttaggcatcacatccggttttggagtgtgacagtgtgtgcaatcttactaatatataatattactttagagtaactaactgtaggaatatataatagagaagattctataggaataattctaaagaatacattctaatttattctttgacttgttgaaaacaaataaacactgaatatatattagattaaatactattaaagcaagatataataggataaaaagttttaagataaatttatgtaaaaagttttaaggttattttatttcataaataagtaacgagagtttaggagatttaacaaattattagaaaggagttaccaaaattatgttgaaaaggtttaacatagcttgattaaggaacaatcgatattaaatactaacaaagtaattgaaaatgaaacaaaaataaatgaggaaaaaatcacatgaaaagatttttcttttcttgtctacatctaataaaagacaaaaaagaaattgaagaaaaaaatcatgaaaatcatatgtccctatttatttgtttgtctacatcgaataaaagacaaaaaagtcatctcagataataatgatagtcagatcatctcttatcatgtctttatctcgctcctctctgttgggttctaaagggtgattagggcttgcaaataatatgattgataaattagttgacaaaaacttatactaaaaactaatattattatatgaaaactaatataaagaaaaatattaaaactgttgagagattaaatctccccataaacaaaactcactaaacgactacattgtggattctattatgttgtgctatgagaatagggatcttcaatttatagatctccaaatttttcctctaaggaaagaataaaccaaatatggaagaaaattatatttttcttttagaaaaagttcaagcatttatggtaatactttgacttttctttaaagaaaaaataaacttcaaataagataagaaaatcagggcaaaaccctaacactctcttcgatcccttactcttattttgtgcctcaatcatccaagtgaatttgttttctttctaaaacgatatatagatttgcaaaaatcaaagatctgtaatttcaaaatcatttatgagggacctaattattttctcctccaacacgatgtcactctaggccgattgacaaagaataagtttcctttttattttttgtacaaaaaagtcaagtgtgaaataattaatataaacttaaactacctcctttatggaaaaatatccgataaaattagaacaacacatactttaacataaaattattgaacctcttaaaaattacacaatcgttatggagaaagctaatcgagtatgtgacatggttataacaaaaacaaaaatggagaatctaatttaattccttataatcatacaaaattcatttattaacttgtaaaacaacatacacaagcatagaaataatgttatgataacaaggaaaggaaaagttctcaataaacatcatatcaattaattctctctatatataatgaaagtcagacagaaattagttctagatatatcacctttgtatccattgaactctagtaaatcaaccattggattagaaaccaattcctcatcttgatataccagcaacacagaaacctcttcagtcaaatcataaaaaggttctgtcattagattaatttgaatttgtaagaaaaacacttacaactgaagctatttataaagtatcatttactggcttatgagcctgtttagagataattatatataaataattttatctaaatatctagataatccctcaaatttgacacaaattgtaatttagatacttgaatttatctaaaagagaccaaataaatacttttactattgtcatatacgcactcatgaacaccttatgctgacatggcaaatttatgtgtattgtaaatgcttgtgttattacattattgaatcacaataaaaagattatttcttaaaaaaattaaatttttgattgacttttattccaacaatcaaattatacaacttggggttcattaactatttctattaatatcaaaatttaacattgattattggatattatttgaagttattgaagatgacattatatttattaagtattaattacacttcttgaatagttggaagattctttgatttgtgtccataattcaatagttcaaatggtgaatgtcttgtcttcaagtaacggctaatggtcttagaattaggccttatttatttttgttcggataaattagcccagagatattctaaatagagtatgatattgtgcactttgaccaagttagcataattttttttttttcaaaaagtctcacacattatggaaaaattacgcgagttggcaaatactactaggttattagtcattgagggtagggtatagtttaatttatttactgtcagtaaatacagtttcagtttttttgccattaataatgagacccaccacctctttgtatacctgtcacaccccaaaatcggatgtgatggcacgtgcccaaaccccaccggacacgtcagcctaacacccaaaaacccgacgatacgaaattaataaaacaagaataagatagaaagataagcggaagtctttaaataaactcaacataaccccagaattggttgtcacatgtacaaacctctaatacggaatctgaataaaatatacgagtctcatagtaaagttctagaatagaacagaacaataaatatagataacttgagggcacgtctggaatgaaccgctacctctcaagtaagtctggaagctctaatctgaagatgggtaataagccggatatgacagagctgtcaacctacaccactgtgtagaagcaagggtgagtaccaaaagcaacaggtactcgcaagtaacactaaactaagctaaactagcagctacaaacaactcctttcaatcccaaccgaaccaccgaaacttcattctaacagcgaaccaacaaccaatactacacaattcataatcaacagatatatccaacagtgtctcaacatcaacctcatatcctcatgtaagagcaaatagatcatatatcacatgaagaggggcaaataggtaaagtccacacaccacagacaaagatgaagtcaaatgcgatgcaaatgcaataatgatgtcatgtagtcgtgatgcatgtctgtcctaagatacacatctgttgacgtaatcagaccgcgctgaatactcaaatcagaacccatgggggccacacatggaccatgtatcaccgccagaaccagatcccatcggcatccaaatcgctagccggagctagtccatctcatatatctctagccggagctagtctcaactgtgtctcatatccatccatcctcatatcagtgtctcagaactcatgcaacagatagttcacacatgggatgaataatgaatatgcacgtcatcaatcacaatcatatcacgatcacatcatagtattacacattatctgtctcaatcacaaccatatcacgaccacatcatagtattacacatcatctgtctcaatcacaaccatatcacgaccacatcatagtattacacatcatctgtatcaacatcaatgtctgtatcaatcatagcctactcatgctcttctatcccctcaatatcagttatcacatgacttattcaacaaattcaagtcacatataacacatttagctcgttttattccccatctttcaattacaacaatttcaatcaacaaataaaactcatcctcaatccccattactccccaacacaattaggaaagtagtcatatgtagtctaagaatttaacaaagtttagaagtcacttgcctcaaaacacttcaactagtaactcaaatctgagttttactcttccgagcacgctccaaatcaccacaatctattcataaatggaatcccacaatcaatacgaatctaacaacaccaatatcgtgaaatttggagaaaagggtaaaatggtcaaaaaaaatctcgttccgaaaaatattttcgaaatctggaaatttttagtgaaaaatgttccccaagaaatttagaatccaatagtgaaaaccgtttcgaaaaaggagttgaaatgagttcacaaactcaaattttctattaaattcggattaggcaaaaaaccccaaattttacagttgagatctcaaattttgatgttaaaatccataaataatcgatggaaatcaaagatctaagttggaaataacttacccaatgaattccttgcgaaaatccacttgaaatcacctattttcgagctctcaaagtctaaaaatggagaaatgggtatttttcaagttggggaaaatggctactgttttttttgacttaaaagggctgctattgcagctgaaacacaaccataacaccaaagtttaagtccccgttggaccctcgggattcgttcgaaatctcgtgcacacaaactaaatatgtacccccactaaattcgacgttccggactcaatggaaccgtcggaatttaaattcgaggactccttgacccgaaattcaataagatgccaagaaactagtttaacgccaaaaaaattcgaaactcaatcggagcgtctaaaaattcaaccaagactcattctagacttagaatcgccccccgaaaccaacggtactcttggaatttcaatctgagcctcggaaccttatatgttgaccaaagtcaactctttatcaaaatttcacaactttagcaacttaggacctcaattcttcgtttcaactccaaattcaactccgtaacttcacacagacccgttttgacattctaaaactgccggaatcgacggaattccgatccgagtcccgaaactccaaataactcgaaaaagcactttttaaccaactttaactcataaaaactaaacttctcaaaaactcaactttttaccaacttttcctcaaactaactttacaaccacaaaacatgggactcgaggtaactaccgaaagggcaaaatagtcacttccacgaaaaattaccaaaatgacctttcgggtcattacaataccgaatcaacaaagccttcatcggcctttatttatgattttatacaaaatcaaatttatctctcatctcctctcctctcctcatttcctatttttctcctaaaataactctttcacttccaatttgaaattcgaatttcactttctccctccagtcgtgttttactttttgcaggtaaccgcctaaatcataggtgaacctcttttttttttttttttcatttttcaattgtatatgtattgtgcttgttagtgtttggataattttttctcaaaattccctcattacttattagataatcatttttatagaaaataaaatggatgattcgactagaggattatgagaggtacgtcattgcatgtcaaagtttttaataatcaaccttcattttcactctgtttaactcaagattttggagtcaatgcagggtctatggaaaaatctaaacaaattctagagtaaaaatctattgaagaattgagatccaagaaaaaaatgacccaattgcacttccagaagtcatcaacaatgtcaaggcaagcgacattaaaattgttgaaggagaaagtaagaggaaagccaaagatagtgattctgaggaggttgtgtctccttcattagatcaagacaaatacgaagaacatcaggtatttgcttaaaacacaattgtatgtagatatttgtatattttgttagtgatatacaaaattgtatgtagtatatgtatattttctgcttacatcacaattgtatatagatatttgtatattttgttagttatatacaaaattgcttgaagtatatgtatattttttgcttaaatcataattgtatatatatatttgtatatcttgtaagttatatacaatagtatgaattaaacaatatacaaaccttacattattatatatacagttaggttacaccaaaaattatcaaattaaagcacaacttttttatcgaatcatatacaattcatatatataattgacttagtaattttatacaactacttacacttatacatggtataagaattttgcacaattacttacatatatacaatattatcaattaaacaatatacaaatcgtataacttatatatacagtaaaattacaacaacaacaacaaaaattatcaaattaaagcacaccgttgttgtcgaatcatatacacttcatatataaaaattgtgtcattcaatttttcgaacaaaaaattagaattgaattggtaataaaaaatttatctaatcttgtataaacaaaattaaattattgcaaaccattagaatgaaaaaaacaaaaataatccgttttccaaaatttcaattatatactatacaaatcaattgtatactttcttgctgttcaaaacatgaagtttccttgaaagaaacgcttacctagcgttgaatatacaagaatattgattaatcttatgcttcagtcgtttgaggaacccagttgttatggtgtttctattgctatagaactcctttttggaaaaatatttgattttggacgattagcttgaacattgggactatataaattttttattaccgtatttagcactcatgtatccatttattaaaaaaaaatgtataaattatatttttaaaagaaaatatacaaaattaatgcttcatagcaaactaaactatgcccattgaatgtaattactaaactatacctatagagcgttatttcattaaatacgtttatcatatatgaaattttcccttaagagatcctacaccttatatatagcttctcaaatgtggaaattcaatctcacacccaacaatctttccctcagactaagtttcatggcccaatatcacaatgatccacgagtcaattcatgagattcactatgtgcatcacccacatcgtctaagtattttatggcaatcaagccctacaactagcttcttctttatatatatatgtgtgtgtatatgtgcgcgcgcgcgcatctctaattaatctcgtaaagggattaaggggccaatttcaaagaattaggcgattttcttagtttttcgtgtgtgttaacccataaatattttggtgatatggttttcggacgatttcttttgtgcaacttatatggaacccttcgtagggagttagtctcacactttttagagtccattttgggcactcaggggctaatttataggaaataggtgatcttctcagtccgtctgtattagcccatgaatattttggtgatatgtcttccgaataatttctttgtaaaatctttacgggaccctccatagggagttaatggagcagtacgtatagtctcacaattttagagttcattttgggcatttaggggccaatttacaggaattaggtgactttctcagtgttttgtgtgtgttagcccattaatatttggtgatatgactttcagacgatttctttgctacacatttacgaaaccctctgtagggagtcgggggagcagtacgtacaatctcacaattttagagtccattttagacatttaggggccaatttaaagaaattggacaattttctcagtttttcgtgtctgttagccattaatatattggtgaatatgacctacggatgatttctaatagaaatctttacgaaaccttcaatagggagttgggggagcaatacgtaccgtctgacaatttttagagtccattttgggcatttaagggccaatttacaggaattagacaattttctcagtatttttccatgtgttagcccataaatattttgttgctttgacttttagagtctaaacttctcatgtatattaagagatatttatgcttggttaattgaatcgaactaggaatagagaaattcctacttggatcttaatatttctctctctttgatttggaaaattctacgaagttgctttcaatggaattaaaatcataaatctattgtatgtaagaaacatacttatattcatgaatagatatgtgtagggtctaataatgaattatcacaattttttctactttttcctgtcagagtcctgctttttctttttctttttcttttttaactttggtctctgcttttgtctacatgatgataaggttggtggacctagctggaaatgtgatggaaatagctagtaaaagaaagaactttgcattttctgttttcttaaaaactgaaaaattacataacttgtggcaatttgttcattttcatactgagagatatttctattttttggatatatggcttatgctgctgttacttcccttatgagaaccatacatcaatcaatggaacttactggatgtgatttgcaaccgttttatgaaaagctcaaatctttgagagctattctggagaaatcctgcaatataatgggcgatcatgaggggttaacaatcttggaagttgaaatcgtagaggtagcatacacaacagaagatatggttgactcggaatcaagaaatgtttttttagcacagaatttggaggaaagaagcagggctatgtgggagatttttttcgtcctggaacaagcactagaatgcattgattccaccgtgaaacagtggatggcaacatcggacagcatgaaagatctaaaaccacaaactagctcgcttgtcagtttacctgaacatgatgttgagcagcccgagaatataatggttggccgtgaaaatgaatttgagatgatgctggatcaacttgctagaggaggaagggaactagaagttgtctcaatcgtagggatgggaggcatcgggaaaacaactttggctacaaaactctatagtgatccgtgcattatgtctcgatttgatattcgtgcaaaagcaactgtttcacaagagtattgtgtgagaaatgtactcctaggccttctttctttgacaagtgatgaacctgatgatcagctagcggaccgactgcaaaagcatctgaaaggcaggagatacttggtagtcattgatgacatatggactacagaagcttgggatgatataaaactatgtttcccagactgttataatggaagcagaatactcctgactactcggaatgtggaagtggctgaatatgctagttcaggtaagcctcctcatcacatgcgcctcatgaattttgacgaaagttggaatttactacacaaaaagatctttgaaaaagaaggttcttattctcctgaatttgaaaatattgggaaacaaattgcattaaaatgtggaggattacctctagcaattactgtgattgctggacttctctccaaaatgggtcaaagattagatgagtggcaaagaattggggaaaatgtaagttcggtcgttagcacagatcctgaagcacaatgcatgagagtgttggctttgagttaccatcacttgccttctcacctaaaaccgtgttttctgtattttgcaattttcacagaggatgaacagatttctgtaaatgaacttgttgagttatggcctgtagagggatttttgaatgaagaagagggaaaaagcatagaagaggtggcaacaacatgtataaacgaacttatagatagaagcttaattttcatccacaattttagttttcgtggaacaatagaaagttgtggaatgcatgatgtgacccgtgaactctgtttgagggaagctcgaaacatgaattttgtgaatgttatcagaggaaagagtgatcaaaattcatgtgcacaatccatgcagcgttcctttaagagtcgaagtcggatcagaatccataaggtggaagaattggcttggtgtcgtaacagtgaggctcattctattatcatgttgggtggattcgaatgcgtcacactggaattgtctttcaagctagtaagagtactagatcttggtttgaatacatggccaatttttcccagtggagtactttctctaattcatttgagatacctatctttgcgttttaatccttgcttacagcagtatcaaggatcgaaagaagctgttccctcatcaataatagacattcctctatcgatatcaagcctatgctatctgcaaacttttaaacttaaccttccatttcccagttattatcctttcatattaccatcggaaattttgacgatgccacaattgaggacgctgtgtatgggctggaattacttgcggagtcatgagcctacagagaacagattggttttgaaaaatttgcaatgcctcaatcaattgaaccctcggtattgtacagggtctttttttagactatttcccaatttaaagaagttgcaagtatttggcgtcccagaagactttcgcaatagccaggacctgtatgattttcgctacttatatcagctcgaagaattgacatttcgtttatattatccatatgctgcttgctttctaaaaaacactgcaccttcaggttctacgcaagatcctctgaggtttcagacggaaatattgcacaaagagattgatttcgggggaactgcacctccaactttactcttacctcctccggatgcttttccacaaaaccttaagagtttaacttttaggggagaattctctgtggcatggaaggatttgagcattgttggtaaattacccaaactcgaggtccttatactatcatggaatgccttcataggcaaggagtgggaagtagttgaggaagggtttcctcacttgaagttcttgtttctggatgatgtatacattcgatactggagagctagtagtgatcactttccgtaccttgaacgagttattcttagagattgccgtaatttggattcaatccctcgagattttgcagatataaccacactagctcttattgatatagattactgtcaacaatctgttgtgaattccgccaagcaaattcaacaggacattcaagacaactatggaagctctatcgaggtccatactcgtcatcttttgtaagacatcttcttccttgctttacaacaataattaactcatcatcatagtaaactcgataataatctggataatagccttagtaagtcaaattgcaccaattcaacaaaagttcttgatgctgtcattgtgtttgatttgaatccttccaatattgtgtaacttgttatacttgcatgttcattcttgattttgggaagtgtaacatttcatttttcatcttttgtggctagcattcccaagagtgtgacaacagttgaagatgatgatgatagtgtgacaacagatgaagatgatgatgatgatgactttgagaaagaagttgcttcttgccgcaataatgtgtaagttcttatacctgcatgctcattcttgctataatgttctcttgttccttaattatgggacatctgacatattattttccatgttttgcgtcttttatttttctgcagcgagtagttaaggtgttctgaggactagccagttctctgaaataaatgtcaaatcagaagccaaatgtgtgagtgtttgttttgttcgttttcattttttctgcataaggtggcaggatgattgcaaatggcttgtaatttaattgtatatgatctttcgtatagccatttgtcagtggttcttaagatactccaaattttatgcacatacatacatactgtacaggccagaacagactccagtaacgtgtgtttcctttcttgggagtcctcaatctacctcgcaaaggctaaatccagtggcaccagctttattactaaaacattcacacgggaacagttgagaaaaactaggcctccataccaaacacacccttaaacttgagctggttgatagagactagagagtagagagcactacatggattatggacctagctaaaagaaagaccttttgtttgaagataagcttaagaaattcgcacactctctgtcaccttgacacaagtgttctcctcgaccccaactaataatgtatgatcacaaatttcctgtcttttttttaaactttggtctcttcttttgtctacatgatgataaggttagtgacctcgcatctttctactttatcctgttagtggacctagctggaaatgtgatggaaatagttagtaaaagtaagatctttgcattttctgttttcttaaaaactgaaatattacataacttgtggcaattaatttgtccattttcatactgagagtgagagagtcctattttttggatttatggcttatgctgctgttacttcccttatgagaaccatacaccaatcaatggaaattattcaatgtgatttgcaaccgttttatgaaatatgttttttgacttacaaacattgaattaaaatcttttgaacttttataaattaagatttttttcttttaaagaaatcgatactgtaatcctctatatcaacgagcttactcatgtgaaggtcaagtgataaaaccaggggccagagccagtctagacctagggggttcggagcttttgtaattggatcattgtgattacgggttgaatgtctaattttctaggcgattatgatagtattttgtatctgaataatagctcactttttctaagtaatggaaaagaaggtcaaaacgtgccactaaaagacttgactaagacaaaaatgggttgtcaagaacgtagaggagggtaggatggacagttggtcagatctagtatggataatacatggaggtagttggagtggcggctctcccaaaattctgtcatcttagatctttggattcggtcttatacatatgtgaggaaggtaatgaaaaatattggggtagaggattacaacatggggaatcaagatttcagatggtcagtcaactaactgagctactaagatttcaaaaaaaagaaaaagaagggttccatgtgacatgaaagtctcatattgcatagtttttgaatgaggcaaagaagtgaggaatcagatgaaccaccttcgatggaaaattatactatttatacatatagttaaaattgttttctatctttatattattgtagtcagctaatttgcatgtttacttattcatattttgaatagacataatacataaatacatcctttaacttggcttcaaatcaaatttatgcccttcaactttggatgtgcacaaatagacatttaaatttgtataaagttgaagaaatagacacacatgtcctacatgacatcctacatgtcattttttatcctacgtggtgtcttacgtgtattgtgtcatgtaggactcgtgtggctagtcgctcaactttatacaaatttaagtgcatacttgtgcatacccaaagtcggagaacataaacgtcaaatgaggtcaagttaaagggcacatttatgtattatgccttcttgatttcattaataatgaaaatcctgaatcatattcagattccgtcactaatcgttgaattaatatactatgtattatttattggatttttttgctatcttatttttaattgttcaaagttttgtttattatctttagcataatatctgattatattattttgatatactttttctagccctaattacttgtccatttttgaattgacacacctattaagaaaacaattattgaaatagtgagtttactattttacccatattaattatgaagtgggtgatttaaaaactcaagattttcaaaaagttctacttttttcaaagtaataaattaagggtataatatgtaaaaaaaattattctttcttgatttgtcaaaatagaaaagtaattaggaataactaaaaaaatggataaataattaaaaacggagggagcaatatgttatctttagcctaataatatctgattaatggccaccctaattgattggataggagaggatagacttgcttccaagtaagccaaaatataaaaagttgacaaaagggtgctaaattcgagacacatgtagtacttatataattcatgtgcggactcgttcttttgtagtactccttccgttctattttatatgtcatatttttattttatactttcattaagaaatgatgtaattttatctttctattcttatttaatgtttttttaagtcaattttataataaatgatgaatatattttcaagattaattaactactctatcaagggtataataggtaaaatatggtaatttatacataaattttataaaatgacaagtattgtggtccaactatttatagaaagagatgacatataaaatgggacggagggagttataaagttgacttaagaaaacatttaataagggtagaagggtaaagttacattatttcttaatgtaaatgtaaagtaaaaatgtaacatataaaatgggaaggagggagtagtattttctcgttttattttacgtggcactctattctcataatctatctttaaaaatgtcattttattgtaattgaaaataatttaacttaaaattctccatctacccttaattaatgaaatgatttacaattatataaatatataaaaattgttttagcttataattttctaaaatctttttttctcttatacatcgtattaagtcaaacaatactaagtcaaatggaatggcggagtatttcttttattttttttcacaccgtccatatgttttctcccatcccccagacccccactatgtatattcactccttagttgaatctgaatttagagtttagaagctt

SEQ ID NO: 258 - DNA, 396 bp, Arabidopsis thaliana
  source 1..396: mol_type = genomic DNA
atgtctacaccatcaggttcaaatccgttaccaatggccgacaagttagaagcaaaaggtcgtatagcatccatcaagttcgactatgtcaagaatggtcaacctaaagctggatcaacccatggtgtctcatatcacaatttcaccgagtggtttgatcttaaccatacatgcgatgagcatatcttatctgtgaagtgttactacgatgatggtgagatacaaggacttgtgatcaaaaccaatatcaggacgtctgcatatatgggatataacattggtactacgtttacacttgaagtcaaaggcaagaagatcgttgggtttcatggatcttttgataaaaaccttacctcgcttggagcttatttcgcaccgctttctcctgctaagtaa

SEQ ID NO: 259 - DNA, 978 bp, Pepper mild mottle virus
  source 1..978: mol_type = genomic DNA
cacaaacacgtttttattccggctgtgtagtctttcaacgttgtcttccgatgcccgtgtttccaaacttcagccaagaaatcgtctaagcctaaccttttccaaatctcatactcgactgcacaatgaaattcgttctgtgatttgtcatacttggaaatgtctagctctaatatgtccataggaacattagagtccagatctgagaaaaattcttcgatctgtgtaggcgttttccttgtataaaacatgaatcttgaactgtcaattgtctctagcagctgtcttgttaattctgaaaatacaggaccaaaaagcgcattgattttcttgctatgatacacaatagtttgcaaagccgggtattcagtttgaatactaagatccaaacgctgtttcggctgctgcttgatcatgtgcctgtattgatcaacggctggtaaatcaataaagtcaaaatcagccaactggccaattgttgacttctcttgcttttcgatccatctttccaaactcgcccttgaaagcagaggtatattttttggttttttcttttctttaattaagtatgcatcaaaaaacttatctactactagagaagcggtgtcttcgatgtcaacaacccctactaattcgggagagttgaaatttcttttgatcatcgcgaccaaattttccaacaatccaggttttcgaggtttttcagcagcagtcctgatcacaggtttcaatgtcgtctcagattctctcggaagaggcaccgatttcgacatatccaacacacaatccttgacattcaaactattctctcgtatttgcatagttacagcatcatactcattgagtatagtactgtttcccggcaaacacttgtcgtaataatattgcatgtcagaaacatctcctgtttttggtgctgcgacgaaaaggttaacacctttgtacaccgattctatctgtaattgctattgagtcgac

SEQ ID NO: 260 - DNA, 2370 bp, Bacillus thuringiensis
  source 1..2370: mol_type = genomic DNA
atgaacatgaataatactaaattaagcgcaagggccctaccgagtcttattgattattttaatggcatttatggatttgccactggtatcaaagacattatgaatatgatttttaaaacggatacaggtggtaatctaaccttagacgaaatcctaaagaatcagcagttactaaatgagatttctggtaaattggatggggtaaatgggagcttaaatgatcttatcgcacagggaaacttaaatacagaattatctaaggaaatcctaaaaattgcaaatgaacagaatcaagtcttaaatgatgttaataacaaactcgatgcgataaatacgatgcttcatatatatctacctaaaattacatctatgttaagtgatgtaatgaagcaaaattatgcgctaagtctgcaaatagaatacttaagtaagcaattgcaagaaatttctgataaattagatattattaacgtaaatgttcttattaactctacacttactgaaattacacctgcatatcaacggattaaatatgtgaatgaaaaatttgaagaattaacttttgctacagaaaccactttaaaagtaaaaaaggatagctcgcctgctgatattcttgatgagttaactgaattaactgaactagcgaaaagtgttacaaaaaatgacgttgatggttttgaattttaccttaatacattccacgatgtaatggtaggaaataatttactcgggcgttcagctttaaaaactgcttcagaattaattgctaaagaaaatgtgaaaacaagtggcagtgaagtaggaaatgtttataatttcttaattgtattaacagctctacaagcaaaagcttttcttactttaacaacatgccgaaaattattaggcttagcagatattgattatacttctattatgaatgaacatttaaataaggaaaaagaggaatttagagtaaacatccttcctacactttctaatactttttctaatcctaattatgcaaaagttaaaggaagtgatgaagatgcaaagatgattgtggaagctaaaccaggacatgcattggttgggtttgaaatgagcaatgattcaatcacagtattaaaagtatatgaggctaagctaaaacaaaattatcaagttgataaggattccttatcggaggttatttatggtgatatggataaattattgtgtccagatcaatctgaacaaatttattatacaaataatatagtatttccaaatgaatatgtaattactaaaattgattttactaagaaaatgaagactttaagatatgaggtaacagctaattcttatgattcttctacaggagaaattgacttaaataagaagaaagtagaatcaagtgaagcggagtataggacgttaagtgctaaagatgatggagtgtatatgccgttaggtgtcatcagtgaaacatttttgactccgattaatgggtttggcctccaagctgatgaaaattcaagattaattactttaacatgtaaatcatatttaagagaactactgttagcaacagacttaagcaataaagaaactaaattgatcgtcccgccaagtggttttattagtaatattgtagaaaatgggaacttagagggagaaaacttagagccgtggatagcaaataataagaatgcgtatgtagatcatacaggcggagtgaatggtactagagctttatatgttcataaggacggaggattttcacaatctattggagataagttaaaaccgaaaactgagtatgtaatccaatatactgttaaaggaaaaccttctattcatttaaaaaatgaaaatactggatatattcattatgaagatacaaataacaatttagaagattatcaaactattactaaacgttttactacaggaactgatttaaagggagtgtatttaattttaaaaagtcaaaatggagatgaagcctggggagataactttacaattttggaaattagtccttctgaaaagttattaagtccagaattaatcaatgtaaataattggattcgcacgggatcaactcatattagcggttatacactcactctctatcagggaggaggaggaaatctaaaacaaaaccttcaattagacagtttttcaacttatagagtgaatttttctgtgaccggagatgctaatgtaaggattagaaattctagggaagtgttatttgaaaaacgatatatgagcggtgctaaagatgtttctgaaattttcactacaaaattggggaaagataacttttatatagagctttctcaagggaataatttatatggtggtcctcttgtacatttttacgatgtctctattaagtaa

SEQ ID NO: 261 - DNA, 2370 bp, Bacillus cereus
  source 1..2370: mol_type = genomic DNA
atgaacaagaataatactaaattaaacgcaagggccctaccgagttttattgattattttaatggcatttatggatttgccactggtatcaaagacattatgaatatgatttttaaaacggatacaggtggtaatctaaccttagatgaaatcctaaagaatcagcagttactaaatgagatttctggtaaattggatggggtaaatgggagcttaaatgatcttatcgcacagggaaacttaaatacagaattatctaaggaaatcttaaaaattgcaaatgaacagaatcaagtcttaaatgatgttaataacaaactcgatgcgataaatacgatgcttcatatatatctacctaaaattacatctatgttaagtgatgtaatgaagcaaaattatgcgctaagtctgcaaatagaatacttaagtaaacaattgcaagaaatttctgataaattagatattattaacgtaaatgttcttattaactctacacttactgaaattacacctgcatatcaacggattaaatatgtgaatgaaaaatttgaagaattaacttttgctacagaaaccactttaaaagtaaaaaaggatagctcgcctgctgatattcttgatgagttaactgaattaactgaactagcgaaaagtgttacaaaaaatgacgttgatggttttgaattttaccttaatacattccacgatgtaatggtaggaaataatttattcgggcgttcagctttaaaaactgcttcagaattaattgctaaagaaaatgtgaaaacaagtggcagtgaagtaggaaatgtttataatttcttaattgtattaacagctctacaagcaaaagcttttcttactttaacaacatgccgaaaattattaggcttagcagatattgattatacttctattatgaatgaacatttaaataaggaaaaagaggaatttagagtaaacatccttcctacactttctaatactttttctaatcctaattatgcaaaagttaaaggaagtgatgaagatgcaaagatgattgtggaagctaaaccaggatatgcattggttggttttgaaatgagcaatgattcaatcacagtattaaaagtatatgaggctaagctaaaacaaaattatcaagttgataaggattccttatcggaggttatttatggtgatacggataaattattgtgtccagatcaatctgaacaaatatattatacaaataacatagtatttccaaatgaatatgtaattactaaaattgatttcactaaaaaaatgaaaactttaagatatgaggtaacagcgaatttttatgattcttctacaggagaaattgacttaaataagaaaaaagtagaatcaagtgaagcggagtatagaacgttaagtgctaatgatgatggagtgtatatgccattaggtgtcatcagtgaaacatttttgactccgataaatgggtttggcctccaagctgatggaaattcaagattaattactttaacatgtaaatcatatttaagagaactactgctagcaacagacttaagcaataaagaaactaaattgatcgtcccgccaagtggttttattagcaatattgtagagaacgggtccatagaagaggacaatttagagccgtggaaagcaaataataagaatgcgtatgtagatcatacaggcggagtgaatggaactaaagctttatatgttcataaggacggaggattttcacaatttattggagataagttaaaaccgaaaactgagtatgtaatccaatatactgttaaaggaaaaccttctattcatttaaaagatgaaaatactggatatattcattatgaagatacaaataataatttaaaagattatcaaactattactaaacgttttactacaggaactgatttaaagggagtgtatttaattttaaaaagtcaaaatggagatgaagcttggggagataactttattattttggaaattagtccttctgaaaagttattaagtccagaattaattaatacaaataattggacgagtacgggatcaactcatattagcggtaatacactcactctttatcagggaggacgaggaattctaaaacaaaaccttcaattagatagtttttcaacttatagagtgtatttttctgtgtccggagatgctaatgtaaggattagaaattctagggaagtgttatttgaaaaaagatatatgagcggtgctaaagatgtttctgaaatgttcactacaaaatttgagaaagataacttttatatagagctttctcaagggaataatttatatggtggtcctattgtacatttttacgatgtctctattaagtag

SEQ ID NO: 262 - DNA, 2310 bp, Bacillus cereus
  source 1..2310: mol_type = genomic DNA
atgaaaaatatgaagaaaaagttagcaagtgttgtaacctgtaccttattagcccctatgttttttaatgggaatgtaaatactgcttacgcggacaacaaaatcaatcaggattcttcaaagcaggaataccaacagaaagagatggatcgaaaaggattgcttgggtattattttaaagataaagattttagtaaccttactatgttttcaccaacacgttataatacccttatttatgaccaacaaacagcgaataaattattagataaaaaacaacaagaatatcagtctattcgctggattggtttgattcagagtaacaaaacaggtgacttcacatttgaattatcagatgatgaatgtgcgattatagaaatggatgggaaagtgatttctaataaaggtaaagaaaagcaagttgtccatttagagaaaggaaaattagttccaattaaaattgagtatcaattagacgagccattaaatatcgatgatgaaaaattcaaagggtttaaattattgaaagtagataatcaaaaacaactacatcaagtacaacaagatgaattaagaaaccctgaatttaacaaaaaagagtcacaggaatttttagcgaaagcatcgaaaataaatctttttacgaaaaaaattaagagggacattgatgagggaacggatacagacggtgactctattccggatatgtgggaagaaaatgggtatacgattcaaaatagaatcgctgttaaatggaatgactcgctagcaagtaaagggtatacaaaatttgtttctaatccccttgacagtcacacagttggtgacccttatactgactatgaaaaagcatcgagagatttagatttgtcaaatgcaaaagaaacatttaacccattggtagctgcttttccaagcgtgaatgttagcatggaaaaggtgatattatctccaaataaaaacttatctaatagtgtagaatcgcactcatctacgaattggtcttataccaatactgaaggagcatctgttgaagctgggattgggcctaaaggtttttcttttggggtaagtgcaaactatcaacattctgaaacagttgcacaggaatggggggcatctataggagatactacgcaacttaatactgcgtcagcaggatatttaaatgcaaatgttcgatacaacaatgtgggaacaggagccatttatgatgtaaaacctacaactagctttgtattagaaaagaatacaatcgcaactattacggcaaaatcaaattcaacagctttaagtatatctccgggagaaagttatccgaaaaaaggccaaaatggaattgcgataacatccatggatgattttaactcacatccaattacattaaataaaaaacaattagatcaagtattgactaataaccctattatgttagaaacagaccagacagatgggatttataagataaaagatacacatggtaatattgtcacaggtggcacatggaatggtgtaactcaacaaattaaagcaaaaacagcgtctattattgtggatgacgggaaacaggtagcagaaaaacgtgtggcggcaaaagattatgcttatccagaagataaaacaccgtctttaactttaaaagatgcactgaagctttcattcccagaagagataaaagaaacagatggattattgtactataacaacaaaccaatttatgaatcgagtgtcatgacctaccttgatgggaatacggcaaaggaagtaaaaaaacaaataaatgataaaacaggggaatttaaggatgtccaacatttatatgctgttaaacttacacccaaaatgaattttactattaaagtaccggttgcgtatgatacagccaaacaggctgttaatcttggaggggataatccatggggggctaaaggattattagggacatgggtaaatgccatggttgtagataattccggagataaagcatataaaagggttgaacctggttatctactttcacctacattggagttttcagaaggttcattagacaatttaaagaaaaattatagtttttatgttagtatgtacgtgaaatcagataaaccatttactctaagaataaatgctggaccctatagtaccaagagaaccatagaagcatcaaatgattttaaacgcgttgatattcctgcgttttatatagaaggatttccgatagacactataagattagaaggttctgactatccatcggcaatatggtggaaagatgtttcaattacagaagtgtcagcagtaaaaaaataa

SEQ ID NO: 263 - DNA, 1389 bp, Bacillus cereus
  source 1..1389: mol_type = genomic DNA
atgaaaagaatggagggaaagttgtttatggtatctaaaaagttacaattagttactaaagctttattgtttagtacagttttatctatacctttattaaataatgaagaggtaaaagctgaacatttaaatctaaattctcaaagtaaatatcctagctttcaaaatcaaaaaatcactgataatgcagaggattttaaagaggataaggaaaaagcgaaagaatggggagaagtaaaagaaaaagagtggaaattaaccgctactgaaaaaagaaaaataaatgactttttaaatgatacaaacaaaataaaaacaaattataaagaaattactttttctatggcaggttcatttgaagatgaactgaaagatttaaaagaaattgataagatgtttgataaagccaatctctcaagttctattatcacctataaaaatgtggaacccgcaacaattggatttaataagtctttaacagaaggaaatacaattaattctgatgtaatggcgcagtttaaagaacaatttctaggaaaagatattaagtttgatagttatctagatactcatttaactgtccaacaagtttctagtaaagaaagagttattttgaaggttacagtgccgagtgggaagggttctactaatccaacaaaagcaggtgttattttagatggaaatgaacacaaaatgctcattgataatgggtatgtactccatgttgataaggtatcaaaggtagtaaaaaaggggctggagtgcttgcaagtggaagggaccttaaaaaagagtcttgactttaaaaatgatataagtgctaaagcgcatagttggggcatgaaaaattatgaagaatgggctgcaaatttaaccgattcccaaagaaaagctttagatggctatgctaggcaagattataaaaaaatcaatgattatttacgaaatcaaggcggaagtggaaatgaacaattggatgcacaaataaagaacatttctgaaactttaaacaataagccaataccagaaaatattactgtgtatagatggtgtggtatgccagaatttggttatcaaattagtgagcctttacctgccttaaaagattttgaatgggaatttttaaacacaatcaaggaagacaaaggatatattagtacgagcttatcaagtgaacgtctagcggcttttgggtcaagaaaaattatattacgattacaaatcccaaaaggaagtaaaggcgcatatttaagtgccattggtggatttgcaaatgaaaaagaaattcttctggataaagatagtaagtatcatatcaataaaataacagaagtagtcattaaaggcattaagcgatatgtagttgatgcaacattattaacaaattaa

SEQ ID NO: 264 - DNA, 1104 bp, Bacillus thuringiensis
  source 1..1104: mol_type = genomic DNA
atgaaaaatagattttcaaaagtggcattatgcaccgtaccgattttaatggtttctacattcgccagttcaagcatgtcagcttttgctgcagaagccaaatcaccagatttaaatgtatctcaacaagtaataggtccctatgccgaatcttatattgatattgtgcaggatagaatgaaacaaagggataagggatcaaaattaactggtaaaccaataaatatgcaagaacaaataatagatgggtggtttctagctagattttggatatttaaggatcaaaacaataaccatcagacaaatagatttatatcctggtttaaagataatattgctagttcaaaagggtataatagtattgcggagcaaatgggtttaaaaatagaagcagaaaacgatatggatgtaacaaatatagattatacatctaagacaggcgataccatttataatggtatttcagaattgaaaaattatacaggatcaactcaaaagatgaaaacagatagttttcaaagagattatacaaaatcagaatctacttcagtaactaatggattacaattaggatttaaagttgctgctaaaggagtagttgctttggctggggcagactttgaaaccagtgttacttataatctatcaactactacaactgaaacaaatacaatatcagacaagtttactgtcccatctcaagaagttacattgcctccaggacataaagcgatagtgaaacatgatttaagaaaaatggtttattctggtactcatgatctaaagggtgatttaattgtgagttttaatgataaagagattgtacaaaaatttatttatccaaattatagagaaattaatttatctgatatccgtgaaactatgattgaaattgatgaatggaatcatgtaaaccctgtgaatttttatgaattagttggggtcaaaaatcatataaaaaatggtgaaactttgtatatagatactccagctaaatttatgtttaatggtgctaatccatattatagagcaacatttacagaatacgacgggaataataatcctgttcaaacaaaggtattaagtgaaaactttaaattgtag

SEQ ID NO: 265 - DNA, 2862 bp, Spodoptera exigua
  source 1..2862: mol_type = genomic DNA
attgtgaagtgaaatgagatcataatatatttgtgtgtagcgatatttttattaagtagataaatttaaggaccataaatgaagaacctctaacaatttataatttgtgtaaaacataataaacagtttttaactgtgaatgtgcattaccgatttagtatgtgatttaaccccagtgataagagacttatcacttgctgttatttatataactttgatctgattacgaatcttaattaattacaaaatgtatatacatcgatcgactgtgttacgactgtgtgtgtgggtgagcctgttggctctatgtggggcccaacgcgcagagcaactcctggcacagaatccttgctccagcaagacgacgtgcagtgactgcatccgcacggccagctgcgcttggcgttttgcaggagagttcaatggccctcggtgcttcaaccctgccatggagcgagatggcactgcaggatgtgaagaatcctacatattcaacccagataataaacgctctgtcgaccccatgtacaatatggagttaagcagagctaagtctagaatgggcatgtctgctggttcatcttcttatgaagagtcttacagtgcacagggcagtagctttgctgcatcgggatcggcagcaggcgcaggcgctgaagcaggtggcgaaagattggtgcagatgaaacctcagaaagtgaatctcaacctcagaatgaatcaaatgcagaaacttacatttgcgtactccagagctcaagattatcctgttgacttatattaccttatggacttgagtagatctatgaaaaacgatagagagaaactcagtaccctgggaagtttactgtctgctaccatgaggaatatgacgtccatgttcaggatcgggttcggctcctttgtagataaactagtcatgccttatgtatctacagtgcctaagaatttgatatcaccttgcgacggttgcgcagcgccttatggataccaaaatcaaatgtctctgagtactgacaccgacttctttgagaaagcagtagctaacgcagacgtgccgggcaacttggacgcccccgaaggagggttcgacgcgatcatgcaagccgtggtgtgcaagcaacagatcggctggcgagaccaggctaggcgacttcttgttttctccacagacgctggtttccattatgctggcgacggaaagctcggtggtatcgtccaacctaacgatggcgaatgtcacatgaaggacaacacgtacacacactcgacgttgcaggattaccccagcatttcacagattaatcataaggtgaagaagcacgctatcaacgtaatctttgcggtaacggcggaacagatcagcgtgtacgaacagctgagcaagcacatcgaaggttccagtacgggagtgctgagcaacgattccgataacatcgtcgacctcgtccgggaacaatacaacaaaattacgtcaactgtagaaatgaaagactcatcgagtgacgctgtgcaaatagtgtattactcatcttgtctcagcggcaaagaactcacacagacgaacaaatgcgacggattaaaggttggcgatgtcgtggaattcacggctgagattacattgaaagaatgtcccaaagaccgcagcaagtggaagcagactttcgagatctcccccgtcggtatctctgacagcctcactgttgaactggaaatggtctgcgactgtccctgtgaacagcccaatcatcacgcgtacaacgacagtccgctagtatgcagcggcgagggcgtgtctgcgtgcggggtgtgcgtgtgccggccgggccgcttcggcaagaactgcgagtgctcggcgcacggcggcgtctccgccgagcaggagcgcggctgccgccccaccaacgccagcgccggcccgctctgctccaaccgcggcacctgcatctgcggcgtctgcgagtgcaacaagatggacgacccgctcaaggtgatttctggcccgttctgcgagtgcgataacttcacgtgtgacatgaacaaaggtttgctctgctcgggccccgaccacggggaatgtgtctgtggcaaatgtagctgtactcccgagtacaccggaccagcttgccagtgtttgaaggaccaaactccttgtcgatcacctgaaaataacgaaatatgtagcggtaacggaaaatgtgtctgcggtcagtgcgtgtgcaatgtagatgacgaccgtcattattccggaaaatactgtgaaaaatgtcccacctgcccaggccgctgtggtgaattcaaagactgtgtattatgcgaggtacacaaacgtggcccgctgtacaatgccgacacagacacctgtggcgactgtgcgctctatcccataatcgaagaaggcaaaattgaagccaacgaatctcgaaacgaacatttgtgtagtttctacgacgatgaagattgtttatatgtgtacgtgtactcctacaatgagaaccagcagcttgtcattagagcacagaaggaacgggaatgtcccaagaaggtaccaatcttgggaattgtgttgggagtgatcgctgcgatagtgttggttggtttggctttactgatgttatggaagatggcgactactatacacgaccgcagagagtttgcgcgcttcgagaaagaacgtatgatggccaaatgggacacgggcgagaaccctatttacaagcaagcaacatcgaccttcaaaaatcctacatatgctggaaaataattgtattacattacacaaaatagtcagcaaataaaatagtcgtctcaaaacgtaaagcaatcgaatgccgcatttataaaattatcaagatgtcagta

SEQ ID NO: 266 - DNA, 766 bp, Helicoverpa zea
  source 1..766: mol_type = genomic DNA
tgatttcgaattccatcgttcattccaagatgttcaatcaaactcagttgtttgtttttctcgctgtattcactacgagcagtgttttagggaataacaatgatgttaaggatggcgcagcgagtggagctcacagcgaccgactaggtctttggttcggtccccggctaggcaagcgctcgctcagaatatctaccgaagataacagacaagcattcttcaaattactcgaagccgccgacgctttgaaatactattacgaccagctaccttatgagatgcaagctgatgaacctgaaaccagggtcaccaagaaggtgatcttcacccccaagttaggcagaagcctcgcatacgatgacaaaagctttgagaacgtggagttcacgcccagactcggcaggagactgtccgatgatatgcctgccacccccgctgaccaggaaatgtaccgccaagaccctgaacagattgacagcaggacaaagtacttctccccaaggctcggcagaaccatgaacttctcaccacgactcggcagggaactgtcttatgatatgatgccaaataaaatcagggtagtcaggagtacaaacaaaacgcgatcaacataatttggagcaaaaacaagacgcaaagctagtctaacctcaaaatttttataaaacgtgttattttggacgaaataatgtactgttttgtataataagtattattaaataatattaaaaattagtattttgtcgaaataaaggacttaagatat

SEQ ID NO: 267 - DNA, 3468 bp, Bacillus thuringiensis
  source 1..3468: mol_type = genomic DNA
atggataacaatccgaacatcaatgaatgcattccttataattgtttaagtaaccctgaagtagaagtattaggtggagaaagaatagaaactggttacaccccaatcgatatttccttgtcgctaacgcaatttcttttgagtgaatttgttcccggtgctggatttgtgttaggactagttgatataatatggggaatttttggtccctctcaatgggacgcatttcttgtacaaattgaacagttaattaaccaaagaatagaagaattcgctaggaaccaagccatttctagattagaaggactaagcaatctttatcaaatttacgcagaatcttttagagagtgggaagcagatcctactaatccagcattaagagaagagatgcgtattcaattcaatgacatgaacagtgcccttacaaccgctattcctctttttgcagttcaaaattatcaagttcctcttttatcagtatatgttcaagctgcaaatttacatttatcagttttgagagatgtttcagtgtttggacaaaggtggggatttgatgccgcgactatcaatagtcgttataatgatttaactaggcttattggcaactatacagatcatgctgtacgctggtacaatacgggattagagcgtgtatggggaccggattctagagattggataagatataatcaatttagaagagaattaacactaactgtattagatatcgtttctctatttccgaactatgatagtagaacgtatccaattcgaacagtttcccaattaacaagagaaatttatacaaacccagtattagaaaattttgatggtagttttcgaggctcggctcagggcatagaaggaagtattaggagtccacatttgatggatatacttaacagtataaccatctatacggatgctcatagaggagaatattattggtcagggcatcaaataatggcttctcctgtagggttttcggggccagaattcacttttccgctatatggaactatgggaaatgcagctccacaacaacgtattgttgctcaactaggtcagggcgtgtatagaacattatcgtccactttatatagaagaccttttaatatagggataaataatcaacaactatctgttcttgacgggacagaatttgcttatggaacctcctcaaatttgccatccgctgtatacagaaaaagcggaacggtagattcgctggatgaaataccgccacagaataacaacgtgccacctaggcaaggatttagtcatcgattaagccatgtttcaatgtttcgttcaggctttagtaatagtagtgtaagtataataagagctcctatgttctcttggatacatcgtagtgctgaatttaataatataattccttcatcacaaattacacaaatacctttaacaaaatctactaatcttggctctggaacttctgtcgttaaaggaccaggatttacaggaggagatattcttcgaagaacttcacctggccagatttcaaccttaagagtaaatattactgcaccattatcacaaagatatcgggtaagaattcgctacgcttctaccacaaatttacaattccatacatcaattgacggaagacctattaatcaggggaatttttcagcaactatgagtagtgggagtaatttacagtccggaagctttaggactgtaggttttactactccgtttaacttttcaaatggatcaagtgtatttacgttaagtgctcatgtcttcaattcaggcaatgaagtttatatagatcgaattgaatttgttccggcagaagtaacctttgaggcagaatatgatttagaaagagcacaaaaggcggtgaatgagctgtttacttcttccaatcaaatcgggttaaaaacagatgtgacggattatcatattgatcaagtatccaatttagttgagtgtttatctgatgaattttgtctggatgaaaaaaaagaattgtccgagaaagtcaaacatgcgaagcgacttagtgatgagcggaatttacttcaagatccaaactttagagggatcaatagacaactagaccgtggctggagaggaagtacggatattaccatccaaggaggcgatgacgtattcaaagagaattacgttacgctattgggtacctttgatgagtgctatccaacgtatttatatcaaaaaatagatgagtcgaaattaaaagcctatacccgttaccaattaagagggtatatcgaagatagtcaagacttagaaatctatttaattcgctacaatgccaaacacgaaacagtaaatgtgccaggtacgggttccttatggccgctttcagccccaagtccaatcggaaaatgtgcccatcattcccatcatttctccttggacattgatgttggatgtacagacttaaatgaggacttaggtgtatgggtgatattcaagattaagacgcaagatggccatgcaagactaggaaatctagaatttctcgaagagaaaccattagtaggagaagcactagctcgtgtgaaaagagcggagaaaaaatggagagacaaacgtgaaaaattggaatgggaaacaaatattgtttataaagaggcaaaagaatctgtagatgctttatttgtaaactctcaatatgatagattacaagcggataccaacatcgcgatgattcatgcggcagataaacgcgttcatagcattcgagaagcttatctgcctgagctgtctgtgattccgggtgtcaatgcggctatttttgaagaattagaagggcgtattttcactgcattctccctatatgatgcgagaaatgtcattaaaaatggtgattttaataatggcttatcctgctggaacgtgaaagggcatgtagatgtagaagaacaaaacaaccaccgttcggtccttgttgttccggaatgggaagcagaagtgtcacaagaagttcgtgtctgtccgggtcgtggctatatccttcgtgtcacagcgtacaaggagggatatggagaaggttgcgtaaccattcatgagatcgagaacaatacagacgaactgaagtttagcaactgtgtagaagaggaagtatatccaaacaacacggtaacgtgtaatgattatactgcgactcaagaagaatatgagggtacgtacacttctcgtaatcgaggatatgacggagcctatgaaagcaattcttctgtaccagctgattatgcatcagcctatgaagaaaaagcatatacagatggacgaagagacaatccttgtgaatctaacagaggatatggggattacacaccactaccagctggctatgtgacaaaagaattagagtacttcccagaaaccgataaggtatggattgagatcggagaaacggaaggaacattcatcgtggacagcgtggaattacttctcatggaggaatag

SEQ ID NO: 268 - DNA, 3468 bp, Bacillus thuringiensis
  source 1..3468: mol_type = genomic DNA
atggataacaatccgaacatcaatgaatgcattccttataattgtttaagtaaccctgaagtagaagtattaggtggagaaagaatagagactggttacaccccaatcgatatttccttgtcgctaacgcaatttcttttgagtgaatttgttcccggtgctggatttgtgttaggactagttgatataatatggggaatttttggtccctctcaatgggacgcatttcttgtacaaattgaacagttaattaaccaaagaatagaagaattcgctaggaaccaagccatttctagattagaaggactaagcaatctttatcaaatttacgcagaatcttttagagagtgggaagcagatcctactaatccagcattaagagaagagatgcgtattcaattcaatgacatgaacagtgcccttacaaccgctattcctctttttgcagttcaaaattatcaagttcctcttttatcagtatatgttcaagctgcaaatttacatttaccagttttgagagatgtttcagtgtttggacaaaggtggggatttgatgccgcgactatcaatagtcgttataatgatttaactaggcttattggcaactatacagatcatgctgtacgctggtacaatacgggattagagcgtgtatggggaccggattctagagattggataagatataatcaatttagaagagaattaacactaactgtattagatatcgtttctctatttccgaactatgatagtagaacgtatccaattcgaacagtttcccaattaacaagagaaatttatacaaacccagtattagaaaattttgatggtagttttcgaggctcggctcagggcatagaaggaagtattaggagtccacatttgatggatatacttaacagtataaccatctatacggatgctcatagaggagaatattattggtcagggcatcaaataatggcttctcctgtagggttttcggggccagaattcacttttccgctatatggaactatgggaaatgcagctccacaacaacgtattgttgctcaactaggtcagggcgtgtatagaacattatcgtccactttatatagaagaccttttaatatagggataaataatcaacaactatctgttcttgacgggacagaatttgcttatggaacctcctcaaatttgccatccgctgtatacagaaaaagcggaacggtagattcgctggatgaaataccgccacagaataacaacgtgccacctaggcaaggatttagtcatcgattaagccatgtttcaatgtttcgttcaggctttagtaatagtagtgtaagtataataagagctcctatgttctcttggatacatcgtagtgctgaatttaataatataattccttcatcacaaattacacaaatacctttaacaaaatctactaatcttggctctggaacttctgtcgttaaaggaccaggatttacaggaggagatattcttcgaagaacttcacctggccagatttcaaccttaagagtaaatattactgcaccattatcacaaagatatcgggtaagaattcgctacgcttctaccacaaatttacaattccatacatcaattgacggaagacctattaatcaggggaatttttcagcaactatgagtagtgggagtaatttacagtccggaagctttaggactgtaggttttactactccgtttaacttttcaaatggatcaagtgtatttacgttaagtgctcatgtcttcaattcaggcaatgaagtttatatagatcgaattgaatttgttccggcagaagtaacctttgaggcagaatatgatttagaaagagcacaaaaggcggtgaatgagctgtttacttcttccaatcaaatcgggttaaaaacagatgtgacggattatcatattgatcaagtatccaatttagttgagtgtttatctgatgaattttgtctggatgaaaaaaaagaattgtccgagaaagtcaaacatgcgaagcgacttagtgatgagcggaatttacttcaagatccaaactttagagggatcaatagacaactagaccgtggctggagaggaagtacggatattaccatccaaggaggcgatgacgtattcaaagagaattacgttacgctattgggtacctttgatgagtgctatccaacgtatttatatcaaaaaatagatgagtcgaaattaaaagcctatacccgttaccaattaagagggtatatcgaagatagtcaagacatagaaatctatttaattcgctacaatgccaaacacgaaacagtaaatgtgccaggtacgggttccttatggccgctttcagccccaagtccaatcggaaaatgtgcccatcattcccatcatttctccttggacattgatgttggatgtacagacttaaatgaggacttaggtgtatgggtgatattcaagattaagacgcaagatggccatgcaagactaggaaatctagaatttctcgaagagaaaccattagtaggagaagcactagctcgtgtgaaaagagcggagaaaaaatggagaggcaaacgtgaaaaattggaatgggaaacaaatattgtttataaagaggcaaaagaatctgtagatgctttatttgtaaactctcaatatgatagattacaagcggataccaacatcgcgatgattcatgcggcagataaacgcgttcatagcattcgagaagcttatctgcctgagctgtctgtgattccgggtgtcaatgcggctatttttgaagaattagaagggcgtattttcactgcattctccctatatgatgcgagaaatgtcattaaaaatggtgattttaataatggcttatcctgctggaacgtgaaagggcatgtggatgtagaagaacaaaacaaccaccgttcggtccttgttgttccggaatgggaagcagaagtgtcacaagaagttcgtgtctgtccgggtcgtggctatatccttcgtgtcacagcgtacaaggagggatatggagaaggttgcgtaaccattcatgagatcgagaacaatacagacgaactgaagtttagcaactgtgtagaagaggaagtatatccaaacaacacggtaacgtgtaatgattatactgcgactcaagaagaatatgagggtacgtacacttctcgtaatcgaggatatgacggagcctatgaaagcaattcttctgtaccagctgattatgcatcagcctatgaagaaaaagcatatacagatggacgaagagacaatccttgtgaatctaacagaggatatggggattacacaccactaccagctggctatgtgacaaaagaattagagtacttcccagaaaccgataaggtatggattgagatcggagaaacggaaggaacattcattgtggatagcgtggaattacttcttatggaggaataa

SEQ ID NO: 269 - DNA, 3687 bp, Bacillus thuringiensis
  source 1..3687: mol_type = genomic DNA
atgacttcaaataggaaaaatgagaatgaaattataaatgctgtatcgaatcattccgcacaaatggatctattaccagatgctcgtattgaggatagcttgtgtatagccgaggggaacaatatcgatccatttgttagcgcatcaacagtccaaacgggtattaacatagctggtagaatactaggcgtattgggcgtaccgtttgctggacaactagctagtttttatagttttcttgttggtgaattatggccccgcggcagagatcagtgggaaattttcctagaacatgtcgaacaacttataaatcaacaaataacagaaaatgctaggaatacggctcttgctcgattacaaggtttaggagattccttcagagcctatcaacagtcacttgaagattggctagaaaaccgtgatgatgcaagaacgagaagtgttctttatacccaatatatagctttagaacttgattttcttaatgcgatgccgcttttcgcaattagaaaccaagaagttccattattgatggtatatgctcaagctgcaaatttacacctattattattgagagatgcctctctttttggtagtgaatttgggcttacatcgcaggaaattcaacgctattatgagcgccaagtggaacgaacgagagattattccgactattgcgtagaatggtataatacaggtctaaatagcttgagagggacaaatgccgcaagttgggtacggtataatcaattccgtagaggtctaacgttaggagtattaggtctagtggcactattcccaagctatgacactcgcacttatccaataaatacgagtgctcagttaacaagagaagtttatacagacgcaattggagcaacaggggtaaatatggcaagtatgaattggtataataataatgcaccttcgttctctgccatagaggctgcggctatccgaagcccgcatctacttgattttctagaacaacttacaatttttagcgcttcatcacgatggagtaatactaggcatatgacttattggcgggggcacacgattcaatctcggccaataggaggcggattaaatacctcaacgcatggggctaccaatacttctattaatcctgtaacattacggttcgcatctcgagacgtttataggactgaatcatatgcaggagtgcttctatggggaatttaccttgaacctattcatggtgtccctactgttaggtttaattttacgaaccctcagaatatttctgatagaggtaccgctaactatagtcaaccttatgagtcacctgggcttcaattaaaagattcagaaactgaattaccaccagaaacaacagaacgaccaaattatgaatcttacagtcacaggttatctcatataggtataattttacaatccagggtgaatgtaccggtatattcttggacgcatcgtagtgcagatcgtacgaatacgattggaccaaatagaatcacccaaatcccaatggtaaaagcatccgaacttcctcaaggtaccactgttgttagaggaccaggatttactggtggggatattcttcgaagaacgaatactggtggatttggaccgataagagtaactgttaacggaccattaacacaaagatatcgtataggattccgctatgcttcaactgtagattttgatttctttgcatcacgtggaggtactactgtaaataattttagattcctacgtacaatgaacagtggagacgaactaaaatacggaaattttgtgagacgtgcttttactacaccttttacttttacacaaattcaaaatataattcgaacgtctattcaaggccttagtggaaatggggaagtgtatatagataaaattgaaattattccagttactgcaaccttcgaagcagaatatgatttagaaagagcgcaagaggcggtgaatgctctgtttactaatacgaatccaagaagattgaaaacagatgtgacagattatcatattgatcaagtatccaatttagtggcgtgtctatcggatgaattctgcttggatgaaaagagagaattacttgagaaagtgaaatatgcgaaacgactcagtgatgaaagaaacttactccaagatccaaacttcacatccatcaataagcaaccagacttcatatctactaatgagcaatcgaatttcacatctatccatgaacaatctgaacatggatggtggggaagtgagaacattaccatccaggaaggaaatgacgtatctaaagagaattacgtcacactaccgggtacttttaatgagtgttatccgacgtatttatatcaaaaaataggggagtcggaattaaaagcttatactcgctaccaattagaaggttatattgaagatagtcaagatttagagatatatttgattcgttataatgcgaaacatgaaacattggatgttccaggtaccgagtccctatggccgctttcagttgaaagcccaatcggaaggtgcggagaaccgaatcgatgcgcaccacattttgaatggaatcctgatctagattgttcctgcagagatggagaaaaatgtgcgcatcattcccatcatttctctttggatattgatgttggatgcacagacttgcatgagaatctaggcgtgtgggtggtattcaagattaagacgcaggaaggtcatgcaagactagggaatctggaatttattgaagagaaaccattattaggagaagcactgtctcgtgtgaagagggcagagaaaaaatggagagacaaacgtgaaaaactacaattggaaacaaaacgagtatatacagaggcaaaagaagctgtggatgctttattcgtagattctcaatatgatagattacaagcggatacaaacatcggcatgattcatgcggcagataaacttgttcatcgaattcgagaggcgtatctttcagaattacctgttatcccaggtgtaaatgcggaaatttttgaagaattagaaggtcacattatcactgcaatctccttatacgatgcgagaaatgtcgttaaaaatggtgattttaataatggattaacatgttggaatgtaaaagggcatgtagatgtacaacagagccatcatcgttctgaccttgttatcccagaatgggaagcagaagtgtcacaagcagttcgcgtctgtccggggtgtggctatatccttagtgtcacagcgtacaaagagggatatggagagggctgcgtaacgatccatgaaatcgagaacaatacagacgaactaaaatttaaaaaccgtgaagaagaggaagtgtatccaacggatacaggaacgtgtaatgattatactgcacaccaaggtacagctggatgcgcagatgcatgtaattcccgtaatgctggatatgaggatgcatatgaagttgatactacagcatctgttaattacaaaccgacttatgaagaagaaacgtatacagatgtaagaagagataatcattgtgaatatgacagagggtatgtcaattatccaccagtaccagctggttatgtgacaaaagaattagaatacttcccagaaacagatacagtatggattgagattggagaaacggaaggaaagtttatggtagatagcgtggaattactcctcatggaagaatag

SEQ ID NO: 270 - DNA, 3531 bp, Bacillus thuringiensis
  source 1..3531: mol_type = genomic DNA
atggagaataatattcaaaatcaatgcgtaccttacaattgtttaagtaatcctgaggagatacttttagatggagaaagaatatcaactggtaattcatcaattgatatctctctgtcacttgtccagcttctggtatctaactttgtaccagggggaggatttttagttggattattagattttgtatggggaatagtaggcccttctccatgggatgcatttctagtgcaaattgaacaattaattaatgaaagaatagctgcatatgctaggtctgcagcaatttctaatttagaaggattaggaaacaatttcaatatatatgtggaagcatttaaagaatgggaagcagatcctgataatccagtaaccaggactagagtagttgatcgctttcgtatacttgatgggctacttgaaagggacatcccttcatttcgaattgctggatttgaagtaccccttttatccgtttatgctcaagcggccaatttgcatctagctatattaagagattcttcaatttttggagcaagatggggattgacaacaataaatgtcaatgaaaactataataggctaattaggcatattgatgaatatgctaatcactgtgcagatacgtataatcggggataaaataatttaccaaaatctacgtatcaagattggataacatataatcgattacggagagacttaacattaactgtattagatatcgctgctttctttccaagctatgacaataggagatatccaattcagtcagttggtcaactaacaagggaaatttatacggacccattaattacttttaatccacagttacagtctgtagctcaattacctacttttaacgttatggaaagcaacgcaattagaactcctcatttatttgatgtattgaataatcttacaatttttacagattggtttagtgttggacgcaacttttattggggaggacatcgagtaatatctaaccgtataggaggaggtaacataacatctcctatatatggaagagaggcgaatcaggagcctccaagatcttttacttttaatgggcctgtttttaggactttatcaaatcctacttttagacctttacagcaaccttggccagcgccaccatttaatttacgtggtgttgaaggagtagaattttctacacctttaaatagctttacgtatcgaggaagaggtacggttgattctttaactgagttaccgcctgaggataatagtgtgcctcctcgcgaaggatatagtcatcgtttatgtcatgcaacttttgttcaaagatctggaaccccatttttaacaactggtccagtattttcttggacgcatcgtagtgctactgatcgaaatataatctacccggatgtaattaaccaaataccgttagtaaaagcattcaaccttacttcaggtacctctgtagtcagaggtccaggatttacaggaggggatatcatccgaactaacgttaatggtagtgtactaagtatgagtcttaattttagtaacacaacattacagcagtatcgtgtgtgagttcgttatgctgcttctcaaacaatggtcatgagcgtaactgttggagggagtactactggtaatcaaggattccctagtactatgagtgcaaatggggctttgacatctcaatcatttagattcgcagaatttcctgtaggtattagtgcatctggcagtcaaggtgcatcaataagtattagtaataatgtaggtagacaaatgtttcacttagatagaattgaatttctcccagttacttctacatttgaggaggaatatgatttagaaagagcgcaagaggcggtgaatgccctgtttacttctacgaaccaactagggctaaaaacagatgtaacggattatcatattgatcaagtatcaaatctagttgaatgcttatcggatgaattttgtctggatgaaaagcgagaattgtctgagaaagtcaaacatgcgaagcgactcagcgatgagcgcaatttactccaggatcgaaatttcagatccattaatgggcaactaggccgtggctggagaggaagtacggatattaccatccaaggtggagatgacgtattcaaagagaattacgtcacactgccgggtacctttgatgagtgctatccaacgtatctatatcaaaaaatagatgaatcgaaattaaaatcctatacacgttacgagttaagagggtatatcgaggatagtcaagatttagaaatctatttgattcgctacaatgcaaaacacgaaatagtaaatgtaccaggtacagggagtttatggcctctttctatagaaaattcaattgggccttgtggagaaccgaatcgctgcgcgccacaccttgaatggaatcctaatctagattgttcctgcagggacggggaaaaatgtgcccatcattcccatcatttctccttggacattgatgttggatgtacagacttaaatgaggacttaggtgtatgggtgatcttcaagattaagacgcaagatggccatgcaagactaggaaatctagagtttctcgaagagaaaccactattaggggaagcactagctcgtgtgaaaagagcggagaagaaatggagagacaaacgtgaaaaattggaatgggaaacaaatattgtttataaagaggcaaaagaatctgtagatgctttatttgtgaactctcaatatgatagattacaagcggatacgaatatcgcgatgattcatgcggcagataaacgcgttcatagaattagagaagcataccttccagaattatctgtaattccgggtgtaaatgcgggcattttcgaagaattagagggacgcattttcacagcctactctctatatgatgcgagaaatgtcattaaaaatggcgatttcaataatggtttattatgctggaacttgaaagggcatgtagatgtagaagaacaaaacaaccatcgttcagtccttgttgtcccggaatgggaagcggaggtgtcccaagaagttcgtgtctgtccaggtcgtggctatatccttcgtgttacagcgtacaaagagggatatggagagggctgcgtaaccattcatgagatcgaagacaatacagacgaactgaaatttagcaactgtgttgaagaggaagtatatccaaacaacacggtaacgtgtaatgattatactgcgactcaagaagaatacgggggtgcgtacacttcccgtaatcatggatatggcaaatcttatgaaagtaattcttccgtacaagctgattatgcgtcagtttatgaagaaaaagcggacacagatggacgaagagataatcattgcgaatctaacagagggtatggggattacacgccactaccagctggttatgtaacaaaagaattagaatacttcccagaaaccgataaggtatgggttgagattggagaaacggaaggaacattcattgtggatagtgtggaattactccttatggaggaataa

SEQ ID NO: 271 - DNA, 8373 bp, Bacillus thuringiensis
  source 1..8373: mol_type = genomic DNA
tgaaaaataaatttattatttgagaaataaaatcacttgaactcttgtcgcaaatgctaaagcctgagaattggatactatcagaaaacatgcaaatgaaaggtgaaggactcatagagattttgggaaatagttattttaaacaattcattaaattggaagatgattcaacctattttctaagactatctttcaagggaacaggtagggtacccatgattgatgaatctagttatttagttttcgcaaatgttaaggatgaaaattttactagagttattaaaaaatttgtcttcaaagggtgagtgttttattggtatttatggtacctatgtagaaaatgcaagtattatttttctaatgtatttattgttaaagagtagaaaagatataatatttaattatacaaaaattaatagaataccttttgaaagtaatattattccaaaaggaaaaagtttttttatttgtacacgctgataaaagaaagatttcttataatattgcattcagttatcatcgagataaacttgaatcattacttttagaaaagttagctccccggtccttattctccatgtaattaaggtcttgaactatccccactttcacttcgtttagaagtgagggattcctaagtaaagagttctatcgaactctaattgattaggctaaccccgcagtccttgcggttagaagccttattgcttcattctttagattgatactcgcgttaatatccctatcatggtttgtacgacaagaaggacagtcccattcacgtaggtttagatttttaacgtctttattttgatatccacaacaagaacgtaattggctggaagcaaatgttttcgatacgacaatgacttgtttgccataccattttgctttgtattctaacatgaatcgaaattgcgaccaagatacctcaataattgcttttgctaacttatgattttttaacatattcgatacttgcaaatcctctataccgataacatcgtggtttttgatgatttcagttgaaattttgtccaagtaatcttttctagtatttgatatgaattctagctatctttactctttgtttattccagcgagaagatcctttcattcttctagaaagaacacgctgtgttttcggaagttcttgtacttctgtttcaactaatagtgacacaaaatatctaccagaaggggttcgtctaacagtcgcatttacaatacgcccctctacttcgcgacttttagcaaatcgaacaaggcctagtttcggtaactttattttgttccctacaacggcaatgttttcatttgtttgttttgtggtataagattgtacgttgttcttcttagatttaaaacgcggtgcgctgttttgttttttgaaaagcgtgtataagcatccgcaaggttgcgaacagacgactgaatcgcaatactatccacttcttttagccaaacaagctctttcttcatggcaggtagtttggcagagaatgtaccataggtcaagccttttcctgtctctttgtatacttgatcccataaggataggaaatgattgaatacaaagcgagaacacccaatcgttttgttgattagaattgcttgtgcctgatttggatagatacgaaacttataggctttattcatcattatgtaattcacctccatttcggtatatgactattatacaccgaacatacattcgatagatagtggagtaacactttctgtatatctaacaattaagatggcttcctgccatcccttgttcgaattcatctcccacctactcactgggctgtggcccttcacgctccttgaggaaggagtcttcttggctaaaataataaatagatctgttttaatataagggatttgtgcccttctcgttatattcttttattagccccaaaaactagtgcaactaaatatttttataattacactgattaaatactttatttttgggagtaagatttatgctgaaatgtaataaaattcgttccattttctgtattttctcataaaatgtttcatatgctttaaattgtagtaaagaaaaacagtacaaacttaaaaggactttagtaatttaataaaaaaaggggatagtttatggaaataaataatcaaaaccaatgtgtgccttacaattgtttaagtaatcctaaggagataatattaggcgaggaaaggctagaaacagggaatactgtagcagacatttcattagggcttattaattttctatattctaattttgtaccaggaggaggatttatagtaggtttactagaattaatatggggatttatagggccttcgcaatgggatatttttttagctcaaattgagcaattgattagtcaaagaatagaagaatttgctaggaatcaggcaatttcaagattggaggggctaagcaatctttataaggtctatgttagagcgtttagcgactgggagaaagatcctactaatcctgctttaagggaagaaatgcgtatacaatttaatgacatgaatagtgctctcataacggctattccactttttagagttcaaaattatgaagttgctcttttatctgtatatgttcaagccgcaaacttacatttatctattttaagggatgtttcagttttcggagaaagatggggatatgatacagcgactatcaataatcgctatagtgatctgactagccttattcatgtttatactaaccattgtgtggatacgtataatcagggattaaggcgtttggaaggtcgttttcttagcgattggattgtatataatcgtttccggagacaattgacaatttcagtattagatattgttgcgttttttccaaattatgatattagaacatatccaattcaaacagctactcagctaacgagggaagtctatctggatttaccttttattaatgaaaatctttctcctgcagcaagctatccaaccttttcagctgctgaaagtgctataattagaagtcctcatttagtagactttttaaatagctttaccatttatacagatagtctggcacgttatgcatattggggagggcacttggtaaattctttccgcacaggaaccactactaatttgataagatcccctttatatggaagggaaggaaatacagagcgccccgtaactattaccgcatcacctagcgtaccaatatttagaacactttcatatattacaggccttgacaattcaaatcctgtagctggaatcgagggagtggaattccaaaatactataagtagaagtatctatcgtaaaagcggtccaatagattcttttagtgaattaccacctcaagatgccagcgtatctcctgcaattgggtatagtcaccgtttatgccatgcaacatttttagaacggattagtggaccaagaatagcaggcaccgtattttcttggacacaccgtagtgccagccctactaatgaagtaagtccatctagaattacacaaattccatgggtaaaggcgcatactcttgcatctggtgcctccgtcattaaaggtcctggatttacaggtggagatattctgactaggaatagtatgggcgagctggggaccttacgagtaaccttcacaggaagattaccacaaagttattatatacgtttccgttatgcttcggtagcaaataggagtggtacatttagatattcacagccaccttcgtatggaatttcatttccaaaaactatggacgcaggtgaaccactaacatctcgttcgttcgctcatacaacactcttcactccaataaccttttcacgagctcaagaagaatttgatctatacatccaatcgggtgtttatatagatcgaattgaatttataccggttactgcaacatttgaggcagaatatgatttagaaagagcgcaaaaggtggtgaatgccctgtttacgtctacaaaccaactagggctaaaaacagatgtgacggattatcatattgatcaggtatccaatctagttgcgtgtttatcggatgaattttgtctggatgaaaagagagaattgtccgagaaagttaaacatgcaaagcgactcagtgatgagcggaatttacttcaagatccaaacttcagagggatcaataggcaaccagaccgtggctggagaggaagtacggatattactatccaaggaggagatgacgtattcaaagagaattacgttacgctaccgggtacctttgatgagtgctatccaacgtatttatatcaaaaaatagatgagtcgaaattaaaagcctatacccgttatcaattaagagggtatatcgaagatagtcaagacttagaaatctatttaattcgttacaatgcaaaacacgaaatagtaaatgtaccaggtacaggaagtttatggcctctttctgtagaaaatcaaattggaccttgtggagaaccgaatcgatgcgcgccacaccttgaatggaatcctgatttacactgttcctgcagagacggggaaaaatgtgcacatcattctcatcatttctctttggacattgatgttggatgtacagacttaaatgaggacttaggtgtatgggtgatattcaagattaagacgcaagatggccacgcacgactagggaatctagagtttctcgaagagaaaccattattaggagaagcactagctcgtgtgaaaagagcggagaaaaaatggagagacaaacgcgaaacattacaattggaaacaactatcgtttataaagaggcaaaagaatctgtagatgctttatttgtaaactctcaatatgatagattacaagcggatacgaacatcgcgatgattcatgcggcagataaacgcgttcatagaattcgagaagcgtatctgccggagctgtctgtgattccgggtgtcaatgcggctatttttgaagaattagaagagcgtattttcactgcattttccctatatgatgcgagaaatattattaaaaatggcgatttcaataatggcttattatgctggaacgtgaaagggcatgtagaggtagaagaacaaaacaatcaccgttcagtcctggttatcccagaatgggaggcagaagtgtcacaagaggttcgtgtctgtccaggtcgtggctatatccttcgtgttacagcgtacaaagagggatatggagaaggttgcgtaacgatccatgagatcgagaacaatacagacgaactgaaattcaacaactgtgtagaagaggaagtatatccaaacaacacggtaacgtgtattaattatactgcgactcaagaagaatatgagggtacgtacacttctcgtaatcgaggatatgacgaagcctatggtaataacccttccgtaccagctgattatgcgtcagtctatgaagaaaaatcgtatacagatagacgaagagagaatccttgtgaatctaacagaggatatggagattacacaccactaccagctggttatgtaacaaaggaattagagtacttcccagagaccgataaggtatggattgagattggagaaacagaaggaacattcatcgtggacagcgtggaattactccttatggaggaataggaccatcccgagtatagcagttttaataaatattaattaaaatagtagtctaacttccgttccaattaaataagtaaattacagttgtaaaaaaaaacggacattactcttcaaagagcgatgtccgttttttatatggtgtgtgctaatgataagtgcgcacgaaattttattgtcaaaatagtatttacttgagaaaaagatcatgttatgtagagatattcccttataatacttgttccacattcataatttttggatgatacattacaacaaaaacagtcgcaaatttatattttctgcataaaatatatagttaagaacctaagaagagaatcaagtagtaggataaaactgaataaggaagtgtagctacaatgaataaaaaaataagaaatgaagatgagcattcatcgatagaattatcatatagtaattcaaaaaatcaaaagcataaggtaccattttgttgtaccatttcaattcctaaaggatgggaagttatatcagaatgccagcccaaaatcgtctatcaacttgattgtctgtctattataaaagaaacgtgtcgcaaagtggttgaggtaaaagattgtggtcaaacggaaatcgatgttaatgtgttaaaaataaaaggatgtatctcttttctgattaatatagaggtgaggccaaaggatgaacgatgtgtttgcttcacagattcccaaaatcaagacatagcattgtgttgtaaagataccgtatgtgtagatcatgtacttcaatgtagtgtggggcatttaccacctcttcatttaaattgtcacaatgtaacagtctgtgatgtaaaagtggtaccggtctgcgatgcggcctgtcaattcgtgaaagtgacagggggttttcaatttcatcctcacttttaaatatcgaggttccgactcccttgtatattgatgattttctcataaaaagtgactataaatataatgttaaagtttgtatatttaatatatttgcagtgggaatggaaaaggggggctttatcatcctttatagcttgtggaaagaggcgaatttaatgggaaattggtttttatttgaagtcctcgatatatgaaacccttcatgtgaatttttaaaaccgtaaccacatttaagaaaaagaaaaatgtttaaactttcatcactataacattaatatttaaatgaagtgggatatattatgcgaaacttcagatagagatagaaaatgaataactaaaaaaattcttacaagatatcattattttaatttgattattgtttctattctgcttattttatgttaaatttaatatgtacatgtaaaatggtttgaaatttagtatgattacatgcaggaaaagagtacgttcgaaaaagaacgtactcttttatatttaccttgattatcttaaaaatataatcatcatttttattaggtataaatttgatatgaaacacatacattcttaaaagtacttgttttttaatagagcaatatagtttgaactatttatttacggtatataaagctgcacgcctacactatacaggatgtatgaaaaaagttttaaaatccacagatatagcaaagtgctcatttgccatatctgtggattttaaaacataggttatgttacaaaaacattataagagattaaccgtcaaagatgtgaaccagatataagccagctagtttttttacgaatgtagtatacccaaacaatttataagacatatgtatacaaaccttaaattcaaagatttattctcaggaactctaaagtatggatgaaagagaaataagccctggttatttaaacggtgaaggaagttcaatatgataaaggaaaatatcagattagaggctctacacaactaaaaaatttggtgaaaaaatataaagaatttagtggaattacagatacttgtgggaaaaatggtggaatgaaaggtgtatcaaattggttaaaagagaaatatccagttatatggtttacgaaatttgcgggtgtacatcgttgaagtattcataccaaaggtatgaaaaatatacggctagaactcgaaaaatgattaaaaaagtaagatctattcacgtaaagcacaaagaatttggttatccacatatgaaaatccctttacaggaagagggatattttataaatcacaagaaagtatatcgcttaaagatggggctaaacatccaatctattattcgaaagaagcgttgcttctttaaagggaactattccaaattttttctgaatgttttaaatcgtgagtttaaagatcgccaacaaaatgaggcacttgttacagatattacttacctacaattccaagaggaatttcggtatctttctgttgtacaaggtgtttataataacgcaggtgtttcttggaaaatatctacgcgtaatgataatgaacttgtattagatacgattgaaatattggcacaaaaaagagacgtgcgtggaaccattctccattcagatcaaggattccagtacacatctcatgcctacaacaaacgactttccgatttaagtatcattggtaactactcccgcaaaggaaactgccataataacgtttgtatcgagtcatttttctcccatttcaaatcggagatgttgtatttgaatcattttaaaacagaagaaaatttaatacaagccaatgaaaaatatatttacttttataactatagacggttcaaaaaacgactcaaccatc

SEQ ID NO: 272 - DNA, 3516 bp, Bacillus thuringiensis
  source 1..3516: mol_type = genomic DNA
atggagatagtgaataatcagaatcaatgcgtgccttataattgtttaaataatcctgaaaatgagatattagatattgaaaggtcaaatagtactgtagcaacaaacatcgccttggagattagtcgtctgctcgcttccgcaactccaataggggggattttattaggattgtttgatgcaatatgggggtctataggcccttcacaatgggatttatttttagagcaaattgagctattgattgaccaaaaaatagaggaattcgctagaaaccaggcaatttctagattagaagggataagcagtctgtacggaatttatacagaagcttttagagagtgggaagcagatcctactaatccagcattaaaagaagagatgcgtactcaatttaatgacatgaacagtattcttgtaacagctattcctcttttttcagttcaaaattatcaagtcccatttttatcagtatatgttcaagctgcaaatttacatttatcggttttgagagatgtttcagtgtttgggcaggcttggggatttgatatagcaacaataaatagtcgttataatgatctgactagacttattcctatatatacagattatgctgtacgctggtacaatacgggattagatcgcttaccacgaactggtgggctgcgaaactgggcaagatttaatcagtttagaagagagttaacaatatcagtattagatattatttcttttttcagaaattacgattctagattatatccaattccaacaagctcccaattaacgcgggaagtatatacagatccggtaattaatataactgactatagagttggccccagcttcgagaatattgagaactcagccattagaagcccccaccttatggacttcttaaataatttgaccattgatacggatttgattagaggtgttcactattgggcagggcatcgtgtaacttctcattttacaggtagttctcaagtgataacaacccctcaatatgggataaccgcaaatgcggaaccaagacgaactattgctcctagtacttttccaggtcttaacctattttatagaacattatcaaatcctttcttccgaagatcagaaaatattactcctaccttagggataaatgtagtacagggagtagggttcattcaaccaaataatgctgaagttctatatagaagtagggggacagtagattctcttaatgagttaccaattgatggtgagaattcattagttggatatagtcatcgattaagtcatgttacactaaccaggtcgttatataatactaatataactagcctgccaacatttgtttggacacatcacagtgctactaatacaaatacaattaatccagatattattacacaaatacctttagtgaaaggatttagacttggtggtggcacctctgtcattaaaggaccaggatttacaggaggggatatccttcgaagaaataccattggtgagtttgtgtctttacaagtcaatattaactcaccaattacccaaagataccgtttaagatttcgttatgcttccagtagggatgcacgaattactgtagcgataggaggacaaattagagtagatatgacccttgaaaaaaccatggaaattggggagagcttaacatctagaacatttagctataccaattttagtaatcctttttcatttagggctaatccagatataattagaatagctgaagaacttcctattcgtggtggtgagctttatatagataaaattgaacttattctagcagatgcaacatttgaagaagaatatgatttggaaagagcacagaaggcggtgaatgccctgtttacttctacaaatcaactagggctaaaaacagatgtgacggattatcatattgatcaagtttccaatttagttgagtgtttatcggatgaattttgtctggatgaaaagagagaattatccgagaaagtcaaacatgcgaagcgactcagtgatgaacggaatttacttcaagatccaaacttcagagggatcaataggcaaccagaccgtggctggagaggaagcacggatattactatccaaggtggagatgacgtattcaaagagaattacgtcacattaccgggtacctttgatgagtgctatccaacgtatttatatcaaaaaatagatgagtcgaagttaaaagcttatacccgctatgaattaagagggtatatcgaggatagtcaagacttagaaatctatttaattcgctacaatgcaaaacacgagacagtaaacgtgccaggtacgggttccttatggccgctttcagcccaaagtccaatcggaaagtgtggagaaccgaatcgatgcgcgccacaccttgaatggaatcctaatctagattgctcctgcagagacggggaaaaatgtgcccatcattcccatcatttctccttggacattgatgttggatgtacagacttaaatgaggacttaggtgtatgggtgatattcaagattaagacacaagatggctatgcaagactaggaaatctagagtttctcgaagagaaaccactattaggggaagcactagctcgtgtgaaaagagcggagaaaaaatggagagacaaatgcgaaaaattggaatgggaaacaaatattgtttataaagaggcaaaagaatctgtagatgctttatttgtaaactctcaatatgatagattacaagcggatacgaatatcgcgatgattcatgcggcagataaacgcgttcatagcattcgagaagcgtatctgccagagctgtctgtgattccgggtgtcaatgcggctatttttgaagaattagaagggcgtattttcactgcattctccctatatgatgcgagaaatgtcattaaaaatggcgatttcaataatggcttatcatgctggaacgtgaaagggcatgtagatgtagaagaacagaacaaccatcgttcggtccttgttgttccagaatgggaagcagaagtgtcacaagaagttcgtgtttgtccgggtcgtggctatatccttcgtgttacagcgtacaaagagggatatggagagggctgtgtaacgattcatgagatcgaagacaatacagacgaactgaaattcagcaactgtgtagaagaggaagtatatccaaacaacacggtaacgtgtaataattatactgcgactcaagaagaacatgagggtacgtacacttcccgtaatcgaggatatgacgaagcctatgaaagcaattcttctgtacatgcgtcagtctatgaagaaaaatcgtatacagatagacgaagagagaatccttgtgaatctaacagaggatatggggattacacaccactaccagctggctatgtgacaaaagaattagagtacttcccagaaaccgataaggtatggattgagatcggagaaacggaaggaacattcatcgtggacagcgtggaattacttcttatggaggaataa

SEQ ID NO: 273 - DNA, 3525 bp, Bacillus thuringiensis
  source 1..3525: mol_type = genomic DNA
atggagaataatattcaaaatcaatgcgtaccttacaattgtttaagtaatcctgaagtagaaatattaagtgaagaaagaagtactggcagattaccgttagatatatccttgtcgcttacacgtttccttttgagtgaatttgttccaggtgtgggagttgcgtttggattatttgatttaatatggggttttataactccttctgaatggagtttatttcttttacagattgaacaactgattgaacaaagaattgaaacattggaaaggaaccgggcaattactacattacgagggttagcggatagctatgaagtttaccttgaggcactaagagagtgggaagaaaatcctaataatgcacaattaagggaagatgtgcgtattcgatttgctaatacagacgacgctttaataacagcaataaataattttacacttacaagttttgaaatccctcttttatcggtctatgttcaagcggcgaatctacatttatcactattaagagatgctgtatcgtttgggcagggttgggggctggatatagctactgttaataatcattataataggttaataaatcttattcatagatatacggaacattgtttggacacatacaatcaaggattagaaaacttaagaggtactaatactcgacaatggtcaagattcaatcagtttaggagagagttaacattgactgtattagatatcgttgctctttttccgaactacgatgctggagcatatccaattcaaacgtcatcccaattaacaagggaaatttatacaagttcagtaattgaagattctccagtttctgctaatatacctaatggttttaatagagcggaatttggagttagaccgccccatcttatggactttatgaattctttgtttgtaactgcagagactgttagaagtcaaactgtgtggggaggacacttagttagttcacgaaatacggctggtaaccctataaatttccctatttatgggatcttcaatcctggtggcgccatttggattgcagatgaggatccacgtcctttttatcggacattatcagatcctgtttttgtccgaggaggatttgggaatcctcattatgtacttgggcttaggggagtagcatttcaacaaactggtacgaaccacacccgaacatttagaaatagtgggaccatagattctctagatgaaatcccacctcaggataatagtggggcaccttggaatgattatagtcatgtattaaatcatgttacatttgtaaggtggcctggtgagattgcaggaagtgattcatggagagcgccaatgttttcttggacacaccgtagtgcagatcgtacaaatatcattaatccaaatataattacacaaatacctgctgtaaaagcacacaatcttcattcgggttctacggttgttagaggacccgggtttacaggtggtgatctcttacgaagaacgaatactggtacatttgcagatataagagtaaatattactgggccattatctcaaagatatcgtgtaagaattcgctatgcttctacgacagatttacaatttttcacgagaatcaatggaacttctgtaaatcaaggtaatttccaaagaactatgaatagagggggtaatttagagtctggaaactttaggactgcaggatttagtacgccttttagtttttcaaatgcgcaaagtacattcacattgggtactcaggctttttcaaatcaggaagtttatatagatcgaattgaatttgtcccggcagaagtaacattcgaggcagaatctgatttagaaagagcgcaaaaggcggtgaatgccctgtttacttctacaagccaactagggctaaaaacaaatgtaacgggttaccatattgatcaagtgtccaatttagttgcgtgtttatcggatgaattttgtctggatgaaaagagagaattgtccgagaaagttaaacatgcgaagcgactcagtgataagcggaatttacttcaagatccaaacttcagagggatcagtaggcaaccagaccatggctggagaggaagtacggatattactatccaaggaggagatgacgtattcaaagagaattacgttacgctaccgggtacttttgatgagtgctatccaacgtatttatatcaaaaaatagatgagtcgaaattaaaagcctatacccgttatcaattaagagggtatatcgaagatagtcaagacttagaaatctatttaattcgttacaattcaaaacacgaaatagtaaatgtaccaggtacagggagtttatggcctctttctgtagaaaatcaaattggaccttgtggagaaccgaatcgatgcgcgccacaccttgaatggaatcctgatttacactgttcctgcagagacggggaaaaatgtgtgcatcattctcatcatttctctttggacattgatgtcggatgtacagatttaaatgaggacctaggtgtatggttgatattcaagattaagacgcaagatggccacgcaagactagggaatctagagtttctcgaagaggaaccgttattaggcgaagcgttagcacgtgtgaagagagcggagaagaagtggagagacaaacgcgagaaactgcagttggaaacaaatattgtctataaagaggcaaaagaatctgtagatgctttatttgtaaactctcaatatgatagattacaagcggatacgaacatcgcgatgattcatgcggcagataaacgcgttcatagaatccgggaagcgtatctgccagagttgtctgtgattccaggtgtcaatgcggccattttcgaagaattagagggacgtatttttacagcgtattccttatatgatgcgagaaatgttattaaaaatggcaatttcaataatggcttattatgctggaacgtgaaagggcatgtagatgtagaagagcaaaacaaccaccgttcggtccttgttatcccagaatgggaagcagaagtgtcacaaaaagttcgtgtctgtccaggtcgtggttatatccttcgtgttacagcgtacaaagagggatatggagaaggtagcgtaacgatccatgagatcgaagacaatacagacgaattaaagtttagcaactgtgtagaagaaggatatccaaacaacacggtaacgtgtaatgagtatactatgaatcaaggggtaggagagtgtacggatgcatgtaatgtccgtaatcgtggatatgaggatgcatatggacacaatccttcaacgcctgttcattacacaacgccgtacgaagaagaaacgtatacagatgaacgaagagagaatccttgtgaagctaacaaagggtatgtgaattacacgccactaccagttggttatgtaacaaaagaattagaatacttcccagaaaccgataaggtatgggttgagattggagaaacggaaggaacattcattgtggatagtgtggaattactccttatggaggaataa

SEQ ID NO: 274 - DNA, 2920 bp, Bacillus thuringiensis
  source 1..2920: mol_type = genomic DNA
atcgatgaaaatatctctgctttttctttctttatttggtatatgctttacttgtaatcgaaaataaagcactaataagagtatttataggtgtttgaagtcatttcagttcatttttaaaggaggtttaaaagtgttagaaagttattaaggaataatacttacagtaaatcctacctatattttacaattaattatgatatttatgcataaattaaaaatgctttatttgacattacagctaagtataattttttatgaataaaattttatttgaaaattaaataatattatatgtgagggattaatatgaaactaaagaatccagataagcatcaaagcttgtctagcaatgcgaaagtagataaaatcgctacggattcactaaaaaatgaaacagatatagaattgaaaaatattaatcatgaggatttcctaagaatgtctgagcatgagagtattgatccgtttgttagtgcatcaacaattcaaacgggtattggaattgctggtaagattcttggtactctaggtgttccttttgctggacaaatagctagcctctatagttttatcttaggcgagctttggcctaaagggaaaagtcaatgggaaatctttatggaacatgtagaagagcttattgaccaaaaaatatcaacttacgcaagaaacatagcacttgcagatttaaaaggcttaggagatgctttggctgtctaccatgaatcgcttgaaagttggattaaaaatcgcaacaacgcaagggctacaagtgttgtcaagagccaatatattgctttagaactattgtttgttcaaaagctgccttcttttgcagtatcaggtgaggaagtaccattattgccaatatatgcacaagctgcaaatttacacttattattactaagagatgcttctgtttttggaaaagagtggggattatctaattcgcaaatttctacattttataatcgtcaagtcgaaagaacgagtgactattccgaccattgtgtgaaatggtatagtacaggtctaaataacttgagaggtacaaatgccgaaagctgggtccgttataatcaatttcgtaaagatatgacattaatggtactagatttaatcgcattattcccaagctatgatacacttgtatatccaattaaaaccacttctcaacttacaagagaagtatatacagacgcaattgggacagtacatccaaatgcaagttttgcaagtacgacctggtataataataatgcaccttcgttctctgccatagagtctgctgttgttcgaaacccgcatctactcgattttttagaacaagttacaatttacagcttattaagtaggtggagtaacactcagtatatgaatatgtggggaggacatagactggaattccgaacaataggtggagtgttaaatacctcaacacaagggtctactaatacttctattaatcctgtaacattaccgttcacgtctcgagacgtctataggactgaatcattggcagggctgaatctatttttaactcaacctgttaatggagtacctagggttgattttcattggaaattcgccacacttccgattgcatctgataatttttattatctagggtatgctggagttggtacgcaattacaagattcagaaaatgaattaccacctgaaacaacaggacagccaaattatgaatcatatagtcatagattatcccatataggactcatttcagcatcccacgtgaaagcattggtatattcttggacacatcgtagtgcagatcgtacaaatacaattgagccaaatagcattacacaaataccattagtaaaagcgttcaatctgtcttcaggtgccgctgtagtgagaggaccaggatttacaggtggggatatccttcgaagaacgaatactggtacatttggggatatacgagtaaatattaatccaccatttgcacaaagatatcgcgtgaggattcgctatgcttctactacagatttacaattccatacgtcaattaacggtaaagctattaatcaaggtaatttttcagcaactatgaatagaggagaggacttagactataaaacctttagaactgtaggctttaccactccatttagcttttcagatgtacaaagtacattcacaataggtgcttggaacttctcttcaggtaacgaagtttatatagatcgaattgaatttgttccggtagaagtaacatatgaggcagaatatgattttgaaaaagcgcaagagaaggttactgcactgtttacatctacgaatccaagaggattaaaaacagatgtaaaggattatcatattgaccaggtatcaaatttagtagagtctctatcagatgaattctatcttgatgaaaagagagaattattcgagatagttaaatacgcgaagcaaatccatattgagcgtaacatgtagaattaaaatctacctaaatccagaaaaataaaagggttaaatatacaattcttgtaccaatattttgagtgattagatgtaggatgaaatttaattgtatgctatttaacagtagagatattaaaaattaatttatctatacattaatagtatagacatacaaacataagagagcattgtcttttcgtaggctacaatgctctctatttactatttatttttcttttgtatcttcaaattgacgttgttctaagcgttctattgcagctcgtcgtttagtatcatcaatgtttgtataaagagatgttgtttccatagaattatgtcccatttgatttgctaataatactaaatctttattttcattatagtgattagtagcataagtatgacgtaatttatgagggcttttcttttcatcaaaagcccttgtgtatttctctgtaagctt

SEQ ID NO: 275 - DNA, 4623 bp, Bacillus thuringiensis
  source 1..4623: mol_type = genomic DNA
tcaatttaaatatttcattttgaatataataaaactaaataatatgaagtttagaatattaatgttatgagctgctatcaaaaggaaagctgctatcaaaaggaaagcaataatgaagaataaataatagcttatatttttaggaaggccaaaagataagctattaaaacatactgaattcattctaaatataggtaatatatttatatttaataaaattcgttgcattttgtgaatattttcataagctgaaccatatgatttaaactggggccaagataaatggcccaaagttataaaggcatatgtgctaaagtccaaaaaacgggaggtaaatcatcaaaaaaatcgtactatacaattttcttaggtaatgctgtgttaaaactaatcagtggagaaaagttaaataggttgtaatgtaagcacaacgtaaaaggaggagttatattgaattcaaataggaaaaatgagaatgaaattataaatgctttatcgattccagctgtatcgaatcattccgcacaaatggatctatcaccagatgctcgcattgaggatagcttgtgtgtagccgaggggaacaatattgatccatttgttagcgcatcaacagtccaaacaggtattagtatagctggtagaatattaggcgtattaggggtgccgtttgccggacaactagctagtttttatagttttcttgttggggaattatggcctagcggcagagatccatgggaaatttttatggaacatgtcgaacaaattgtaagacaacaacaaataacggacagtgttagggataccgctattgctcgtttagaaggtctaggaagagggtatagatcttaccagcaggctcttgaaacttggttagataaccgaaatgatgcaagatcaagaagcattattcgtgagagatatattgctttagaacttgacattactactgctataccgcttttcagcatacgaaacgaagaggttccattattaatggtatatgctcaagctgcaaatttacacctattattattgagagacgcatccctttttggtagtgaatgggggatgtcatctgccgatgttaaccaatattaccaagaacaaatcagatatacagaggaatattctaaccattgcgtacaatggtataatacagggctaaatagattaagagggacaactgccgaaacttgggtacggtataatcaattccgtagagacctaacattaggtgtattagatttagtggcactattcccaagctatgacactcggacttatcccattccaactaccgcccaacttacaagagaagtgtatacagatccaaacggtgttgtagcaggacccaataatagttggtttagaaatggagcttcgttttccgctatagaaaacgcaattattcgacaacctcacctatatgattttctaacgaaccttacaatttacacgagaagaagtcaagtaggcactacaattatgaatttgtgggcagggcatagaatcacgtttaatagaatacaaggtggttctactagtgaaatggtgtatggggctattactaacccagttagtgttagtgacataccatttgtcaatcgggatgtttaccgaactgtatcattagctggtgggcttggctctctgagtggaatacgttatggtttaactagagttgattttgatatgatatttcgtaaccatcctgatatagtaactggattattttatcatccgggacacgcgggcattgcaacccaagtaaaagattcagacacagaattaccacctgaaacgacagaacagccaaattatagagcatttagtcatctactaagtcatatttcaatgggtccaacgactcaagacgtacctccagtatattcttggacacaccagagtgcagatcgtacgaatacaatcaattcggataggataacacaaataccattggtaaaggcgcataccctccaatcgggtaccactgtagtaaaagggccagggtttacaggaggggatatcctccgtcgaacaagtggaggaccatttgcttttagtaatgttaatctagattttaacttgtcacaaaggtatcgtgctagaattcgttatgcctctactactaacctaagaatttacgtaacggttgcaggtgaacgaatttttgctggtcaatttgacaaaacgatggatgctggtgccccattaacattccaatcttttagttacgcaactattaatacagcttttacattcccagaaagatcgagcagcttgactataggtgccgatacgtttagttcaggtaatgaagtttatgtagatagatttgaattaatccaagttactgcaaccttcgaggcagaatctgatttagaaagagcgcggaaggcggtgaatgccttgtttacttctacaaatccaagaggattaaaaacagatgtaacagattatcatatcgaccaagtatccaatctagtagagtgtttatcagatgaattctgcttggataaaaagagagaattactcgaagaagttaaatatgcaaagcgacttagtgatgagcggaatttactccaagatccgacttttacatccattagtggccaaacagaccgtggatggataggaagcactggtattagcattcaaggaggcgatgacatattcaaagaaaattatgtgagactaccaggtaccgttgacgagtgctatccaacgtatttgtatcaaaaaatagatgagtcacaattaaaatcttatactcgctatcaattaagaggctatatcgaagatagtcaagatttagagatttatttgattcgttacaatgcgaaacatgaaacattaagtgtgccaggtactgagtccccatggccatcttcaggagtatatccaagtggaaggtgcggagaaccgaatcgatgtgcaccacgaatcgaatggaatcccgatctagactgttcttgcagatatggagagaaatgcgttcatcattcccatcatttctccttggatattgatgttggatgtacagatttgaatgaggatctaggcgtatgggtgatatttaagattaagacacaagatggccatgcgaaactaggaaatctagaattcatcgaagagaaaccattattaggaaaagcgctgtcccgtgtgaagagagccgagaaaaaatggagagacaaatatgaaaaactacagttggagacaaaacgagtatatacagaggcaaaagaatctgtggatgctttatttgtagactctcaatatgataaattgcaagctaatacgaacatcgggataatccatggggcagataaacaggttcatcgaatccgagaaccgtatctttcagaattacctgtcattccgagtatcaatgcggccatttttgaagaattagagggccatattttcaaagcgtattctctatatgatgcaagaaatgtcataaaaaatggcgatttcaataatggtttatcgtgttggaacgtaaaagggcatgtagatgtacaacagaaccatcatcgttcggtccttgttctctcagaatgggaagcagaagtgtcacaaaaggtacgcgtatgtccagatcgaggctatatccttcgtgtcacagcgtataaagagggatatggagagggatgcgtaacgattcatgaattcgaagataatacggatgtactgaagtttagaaactttgtagaagaggaagtatatccaaacaacacggtaacgtgtaatgattatactacgaatcaaagtgcagaaggatctacggatgcatgtaattcctataatcgtggatatgaggatggatatgagaatagatatgaacccaatccttcagcaccagttaattacacaccgacgtacgaagaaggaatgtatacagatacacagggatataatcattgtgtatctgatcgaggatataggaatcatacaccattaccagctggttatgtaacactagaattagagtatttcccagaaacagagcaagtatggatagaaattggagaaacggaaggaacatttatcgtaggtagcgtggaattactccttatggaggaataggatacgttttaaagtgaaacgtatgcaaataaagaatgatcgctggcctatattgacagataaataaggaaattaatatatgaacaaaaacggacatcactcttaagggtatgatgtccgttttttatatgatttggtttaaagattgatatgtaaatatatttttttacgaaggctttacataaaaaagaatctttatagcaaaatttaaaattaaatcttacatatagctggattgaaaataaagcaaacttattaattgaattatataaaaagattaaatgctattcaagatcttaacattttgttaaatctacttcattaacgttacttaaatgtattttataataatatttagtaacttgtattggtattttaaattttttgattattaaaagacgttaaatataaaaacagaaagaaggaatgaatttggataataactccttattgaaaagtatgcattgagattataaaaactaaaatcgtggtattttttataataacaaccatgttttttttcat

SEQ ID NO: 276 - DNA, 1902 bp, Bacillus thuringiensis
  source 1..1902: mol_type = genomic DNA
atgaatagtgtattgaatagcggaagaactaccattcgtgatgcgtataatgtagtggctcatgatccatttagttttcaacacaaatcattagataccatacaaaacgaatggacggagtggaaaaaaaataatcatagtttatatgtagatcctattgttggaactgtggctagttttctgttaaagaaagtggggagtcttattggaaaaaggatactaagtgagttacggaatttaatatttcctagtggcagtacaaatctaatgcaagatattttaagagagacagaaaaattcctgaatcaaagacttaatacagacactcttgcccgtgtaaatgcggaattgacagggatgcaagcaagtgtagaagagtttaatcgacaagtagataattttttgaaccctaaccgaaacgctgttcctttatcaataacttcttcagttaatacaatgcagcaattatttctaaatagattaccccagttccagatgcaaggataccaactgttattattacctttatttgcacaggcagccaatttacatctttcttttattagagatgttattcttaatgcagatgaatggggaatttcagcagcaacattacgtacgtatcgagattacctgaaaaattatacaagagattactctaactattgtataaatacgtatcaaagtgcgtttagaggcttaaacactcgtttacacgatatgctagaatttagaacatatatgtttttgaatgtatttgaatatgtatctatctggtcgttgtttaaatatcaaagtcttctagtatcttccagttcgaatttatattcaagtggtagtggaccacagcagacccaatcatttacttcacaagactggccatttttatactctcttttccaagttaattcaaattatgtgttaaatggttttagtggtgctaggctttctaataccttccctaatatagttggtttacctggttctactacaactcacgcattgcttgctgcaagggtcaattacagtggaggaatttcgtctggtgatataggtgcatcgccgtttaatcaaaattttacttgtagcacatttctctcccctttgttaacgccatttgttaggagttggctagattcaggttcagatcgggagggtgttgccaccgttacaaattggcaaacagaatcctttgagacaactttagggttaaggagtggtgcttttacagctcgcggtaattcaaactatttcccagattattttattcgtaatatttctggagttcctttagttgttagaaatgaagatttaagaagaccgttgcactataatgaaataagaaatatagcaagtccttcaggaacacctggtggagcacgagcttatatggtatctgtgcataacagaaaaaataatatctatgccgttcatgaaaatggttctatgattcatttagcgccaaatgactatacaggatttactatttcgccaatacatgcaactcaagtgaataatcaaacacgaacatttatttctgaaaaatttggaaatcaaggtgattccttaagggttgaacaaagcaacacgacagctcgttatacgcttagagggaatggaaatagttacaatctttatttaagagtatcttccataggaaattccactattcgagttactataaacggtagagtttatactgctttaaatgttaatactactacaaataacgatggagttaatgataatggagctcgtttttcagatattaatatcggtaatgtagtagcaagtagtaatactgatgtaccattagatgtaaatataacattaaactccggcactcaatttgatcttatgaatattatgcttgtgccaactaatatttcaccactttattaa

SEQ ID NO: 277 - DNA, 1952 bp, Bacillus thuringiensis
  source 1..1952: mol_type = genomic DNA
tccatggatgaatccgaacaatcgaagtgaacatgatacaataaaaactactgaaaataatgaggtgccaactaaccatgttcaatatcctttagcggaaactccaaatccaacactagaagatttaaattataaagagtttttaagaatgactgcagataataatacggaagcactagatagctctacaacaaaagatgtcattcaaaaaggcatttccgtagtaggtgatctcctaggcgtagtaggtttcccgtttggtggagcgcttgtttcgttttatacaaactttttaaatactatttggccaagtgaagacccgtggaaggcttttatggaacaagtagaagcattgatggatcagaaaatagctgattatgcaaaaaataaagctcttgcagagttacagggccttcaaaataatgtcgaagattatgtgagtgcattgagttcatggcaaaaaaatcctgtgagttcacgaaatccacatagccaggggcggataagagagctgttttctcaagcagaaagtcattttcgtaattcaatgccttcgtttgcaatttctggatacgaggttctatttctaacaacatatgcacaagctgccaacacacatttatttttactaaaagacgctcaaatttatggagaagaatggggatacgaaaaagaagatattgctgaattttataaaagacaactaaaacttacgcaagaatatactgaccattgtgtcaaatggtataatgttggattagataaattaagaggttcatcttatgaatcttgggtaaactttaaccgttatcgcagagagatgacattaacagtattagatttaattgcactatttccattgtatgatgttcggctatacccaaaagaagttaaaaccgaattaacaagagacgttttaacagatccaattgtcggagtcaacaaccttaggggctatggaacaaccttctctaatatagaaaattatattcgaaaaccacatctatttgactatctgcatagaattcaatttcacacgcggttccaaccaggatattatggaaatgactctttcaattattggtccggtaattatgtttcaactagaccaagcataggatcaaatgatataatcacatctccattctatggaaataaatccagtgaacctgtacaaaatttagaatttaatggagaaaaagtctatagagccgtagcaaatacaaatcttgcggtctggccgtccgctgtatattcaggtgttacaaaagtggaatttagccaatataatgatcaaacagatgaagcaagtacacaaacgtacgactcaaaaagaaatgttggcgcggtcagctgggattctatcgatcaattgcctccagaaacaacagatgaacctctagaaaagggatatagccatcaactcaattatgtaatgtgctttttaatgcagggtagtagaggaacaatcccagtgttaacttggacacataaaagtgtagacttttttaacatgattgattcgaaaaaaattacacaacttccgttagtaaaggcatataagttacaatctggtgcttccgttgtcgcaggtcctaggtttacaggaggagatatcattcaatgcacagaaaatggaagtgcggcaactatttacgttacaccggatgtgtcgtactctcaaaaatatcgagctagaattcattatgcttctacatctcagataacatttacactcagtttagacggggcaccatttaatcaatactatttcgataaaacgataaataaaggagacacattaacgtataattcatttaatttagcaagtttcagcacaccattcgaattatcagggaataacttacaaataggcgtcacaggattaagtgctggagataaagtttatatagacaaaattgaatttattccagtgaattaatgaggatcca

SEQ ID NO: 278 - DNA, 3543 bp, Bacillus thuringiensis
  source 1..3543: mol_type = genomic DNA
atgaatccttatcaaaataaaaatgaatatgaaacattaaatgcttcacaaaaaaaattaaatatatctaataattatacaagatatccaatagaaaatagtccaaaacaattattacaaagtacaaattataaagattggctcaatatgtgtcaacagaatcagcagtatggtggagattttgaaacttttattgatagtggtgaactcagtgcctatactattgtagttgggaccgtactgactggtttcgggttcacaacacccttaggacttgctttaataggttttggtacattaataccagttctttttccagcccaagaccaatctaacacatggagtgactttataacacaaactaaaaatattataaaaaaagaaatagcatcaacgtatataagtaatgctaataaaattttaaacaggtcgtttaatgttatcagcacttatcataatcaccttaaaacatgggagaataatccaaacccacaaaatactcaggatgtaaggacacaaatccagctagttcattaccattttcaaaatgtcattccagagcttgtaaactcttgtcctcctaatcctagtgattgcgattactataacatactagtattatctagttatgcacacgcagcaaacttacatctgactgtattaaatcaagccgtcaaatttgaagcgtatttaaaaaacaatcgacaattcgattatttagagcctttgccaacagcaattgattattatccagtattgactaaagctatagaagattacactaattattgtgtaacaacttataaaaaaggattaaatttaattaaaacgacgcctgatagtaatcttgatggaaatataaactggaacacatacaatacgtatcgaacaaaaatgactactgctgtattagatgttgttgcactctttcctatttatgatgtaggtaaatatccaataggtgtccaatctgaacttactcgagaaatttatcaggtacttaacttcgaagaaagcccctataaatattatgactttcaatatcaagaggattcacttacacgtagaccgcatttatttacttggcttgattctttgaatttttatgaaaaagcgcaaactactcctaataattttttcaccagccattataatatgtttcattacacacttgataatatatcccaaaaatctagtgtttttggaaatcacaatgtaactgataaattaaaagctcttggtttggcaacaaatatttatatttttttattaaatgtcataagcttagataataaatatctaaatgattataataatattagtaaaatggatttttttataactaatggtactagacttttggagaaagaacttacagcaggatctgggcaaataacttatgatgtaaataaaaatattttcgggttaccaattcttaaacgaagagagaatcaaggaaaccctaccctttttccaacatatgataactatagtcatattttatcatttattaaaagtcttagtatccctgcaacatataaaactcaagtgtatacgtttgcttggacacactctagtgttgatcctaaaaatacaatttatacacatttaactacccaaattccagctgtaaaagcgaattcacttgggactgcttctaaggttgttcaaggacctggtcatacaggaggggatttaattgatttcaaagatcatttcaaaattacatgtcaacactcaaattttcaacaatcgtattttataagaattcgttttgcttcaaatggaagcgcaaatactcgagctgttataaatcttagtatcccaggggtagcagaactgggtatggcactcaaccccactttttctggtacagattatacgaatttaaaatataaagattttcagtacttagaattttctaacgaggtgaaatttgctccaaatcaaaacatatctcttgtgtttaatcgttcggatgtatatacaaacacaacagtacttattgataaaattgaatttctgccaattactcgttctataagagaggatagagagaaacaaaaattagaaacagtacaacaaataattaatacattttatgcaaatcctataaaaaacactttacaatcagaacttacagattatgacatagatcaagccgcaaatcttgtggaatgtatttctgaagaattatatccaaaagaaaaaatgctgttattagatgaagttaaaaatgcgaaacaacttagtaaatctcgaaatgtacttcaaaacggggattttgaatcggctacgcttggttggacaacaagtgataatatcacaattcaagaagatgatcctatttttaaagggcattaccttcatatgtctggggcgagagacattgatggtacgatatttccgacctatatattccaaaaaattgatgaatcaaaattaaaaccgtatacacgttacctagtaaggggatttgtaggaagtagtaaagatgtagaactagtggtttcacgctatggggaagaaattgatgccatcatgcatgttccagctgatttaaactatctgtatccttctacctgtgattgtgaagcgtctaatcgttgtgagacgtccgctgtgccggctaacattgggaacacttctgatatgttgtattcatgccaatatgatacagggaaaaagcatgtcgtatgtcaggattcccatcaatttagtttcactattgatacaggggcattagatacaaatgaaaatataggggtttgggtcatgtttaaaatatcttctccagatggatacgcatcattagataatttagaagtaattgaagaagggccaatagatggggaagcactgtcacgcgtgaaacacatggagaagaaatggaacgatcaaatggaagcaaaacgttcggaaacacaacaagcatatgatgtagcgaaacaagccattgatgctttattcacaaatgtacaagatgaggctttacagtttgatacgacactcgctcaaattcagtacgctgagtatttggtacaatcgattccatatgtgtacaatgattggttgtcagatgttccaggtatgaattatgatatctatgtagagttggatgcacgagtggcacaagcgcgttatttgtatgatataagaaatattattaaaaatggtgattttacacaaggggtaatggggtggcatgtaactggaaatgcagacgtacaacaaatagatggtgtttctgtattggttctatttaattggagtgctggcgtatctcaaaatgtccatctccaccataatcatgggtatgtcttaggtgttattgccaaaaaagaaggacctggaaatgggtatgtcacgcttatggattgggaggagaatcaagaaaaattgacgtttacgtcttgtgaagaaggatatattacgaagacagtagatgtattcccagatacagatcgtgtacgaattgagataggcgagaccgaaggttcgttttatatcgaaagcattgatttaatttgcatgaacgagtga

SEQ ID NO: 279 - DNA, 1470 bp, Bacillus thuringiensis
  source 1..1470: mol_type = genomic DNA
atgtttacaagtggtgcgaaaaataggttaaagctagaaacgacagattatgaaatagatcaagtggctaatgctatagaatgtatgtcagatgaacaatattcaaaagaaaaactgatgttatgggatcaagtaaaacatgcaaaataccttagtcagtctcgaaatttgcttcaaaatggtgattttgaagatgtatttcatggatggactacaagtgatcatatgtacattcagtcggataattctacttttaaaggaaattatctgaatatatctggggcgcgagacatatacttaacgatatttccaacatacatttaccaaaaaattgatgaatcaaaattaaaaccgtatacacgttacctagtaaggggatttgtaggaagtagtaaagatgtagaactagtggtttcacgctatggaaaagaaatagatacagtcatgaatgtaccatttgatatcccgtatgtatcttctaggcctgtttgtaatgaattatatgatggtgaacaacaaccgtatccaaatgggaatgtaggatattataatccaatgtcagcttttacgccttcttacacatctgatgctcgtcagtgtatgccagggaaaaaacagatagtctgtcaagattctcatcagtttaagttccatattgatacaggtgaagtagattataatacaaatatagggatttgggtcatgtttaaaatatcttccccagatggatacgcattattagataatttagaagtaattgaagaagggccaatagatggggaagcactgtcacgcgtgaaacacatggagaagaaatggaacgatcaaatggaagcaaaacgttcggaaacacaacaagcatatgatgtagcgaaacaagccattgatgctttattcacaaatgtacaagatgaggctttacagtttgatacgacactcgctcaaattcagtacgctgagtatttggtacaatcgattccatatgtgtacaatgattggttgtcagatgttccaggtatgaattatgacatctatgtagagttggatgcacgagtggcacaagcgcgttatttgtatgatacaagaaatattattaaaaatggtgattttacacaaggggtaatggggtggcatgtaactggaaatgcagacgtacaacaaatagatggtgtttctgtattggttctatctaattggagtgctggcgtatctcaaaatgtccatctccaacataatcatgggtatgtcttacgtgttattgccaaaaaagaagggcctggaaatgggtatgtcacgcttatggattgtgaggagaatcaagaaaaattgacgtttacgtcttgtgaagaaggatatattacgaaaacagtagatgtattcccagatacagattgtgtacgaattgagataggcgaaaccgaaggttcgttttatatcgaaagcattgaattaatttgcatgaacgagtaa

SEQ ID NO: 280 - DNA, 4377 bp, Bacillus thuringiensis
  source 1..4377: mol_type = genomic DNA
atggcaattttaaatgaattatatccatctgtaccttataatgtattggcgtatacgccaccctcttttttacctgatgcgggtacacaagctacacctgctgacttaacagcttatgaacaattgttgaaaaatttagaaaaagggataaatgctggaacttattcgaaagcaatagctgatgtacttaaaggtatttttatagatgatacaataaattatcaaacatatgtaaatattggtttaagtttaattacattagctgtaccggaaattggtatttttacacctttcatcggtttgttttttgctgcattgaataaacatgatgctccacctcctcctaatgcaaaagatatatttgaggctatgaaaccagcgattcaagagatgattgatagaactttaactgcggatgagcaaacatttttaaatggggaaataagtggtttacaaaatttagcagcaagataccagtctacaatggatgatattcaaagccatggaggatttaataaggtagattctggattaattaaaaagtttacagatgaggtactatctttaaatagtttttatacagatcgtttacctgtatttattacagataatacagcggatcgaactttgttaggtcttccttattatgctatacttgcgagcatgcatcttatgttattaagagatataattactaagggtccgacatgggattctaaaattaatttcacaccagatgcaattgattcctttaaaaccgatattaaaaataatataaagctttactctaaaactatttatgacgtatttcagaagggacttgcttcatacggaacgccttctgatttagagtcctttgcaaaaaaacaaaaatatattgaaattatgacaacacattgtttagattttgcaagattgtttcctacttttgatccagatctttatccaacaggatcaggtgatataagtttacaaaaaacacgtagaattctttctccttttatccctatacgtactgcagatgggttaacattaaataatacttcaattgatacttcaaattggcctaattatgaaaatgggaatggcgcgtttccaaacccaaaagaaagaatatcaaaacaattcaaactgtatcctagttggagagcgggacagtacggtgggcttttacaaccttatttatgggcaatagaagtccaagattctgtagagactcgtttgtatgggcagcttccagctgtagatccacaggcagggcctaattatgtttccatagattcttctaatccaatcatacaaataaatatggatacttggaaaacaccaccacaaggtgcgagtgggtggaatacaaatttaatgagaggaagtgtaagcgggttaagttttttacaacgagatggtacgagacttagtgctggtatgggtggtggttttgctgatacaatatatagtctccctgcaactcattatctttcttatctctatggaactccttatcaaacttctgataactattctggtcacgttggtgcattggtaggtgtgagtacgcctcaagaggctactcttcctaatattataggtcaaccagatgaacagggaaatgtatctacaatgggatttccatttgaaaaagcttcttatggaggtacagttgttaaagaatggttaaatggtgcgaatgcgatgaagctttctcctggacaatcgataggtattcctattacaaatgtaacaaaacaaaactatcaagtgcgttgtcgttatgcaagtaatagtgataatcctgttttctttaatgtagatactggtggagcgaatccaattttccaacagataaactttgaatctactgtagatagtaatatgggagtaaaaggagaaaatggcgtctatgtagtcaaatctattgctacaactgataattcttttacagtaaaaattcctgcgaagacgattaatgttcatttaaccaaccaaggttcttctgatatctttttagatcgtattgagtttattccttttaaactaacattatctcctactccaattactttagatccgatgaagaccattacagcttctgtcttaagtgcaactagggcctctgatggcataacaaccatcaatgatccagtagatggaactctactttctttacctatgggtacttccatcgattttagtattcttaatcctactcaaactggaacatatcaagtcagtattctctacaaatcttcatccggcggttttactattactaaagtaacaaatgatcaaaacggacagatggtagattatgcttcaacctcagaactacaatatagcaaccctatttacgtcttgtctagcaatacaggaaacactgtattgaccattggacctgggggatattccggcccagatttactcataaaagaaattagattcaccccagcaactccaaattcatcaaataaaattgatacagattttcagttagttgatgggcaaggcacagtaactatttggaaaagtgataaaattgcatatacactagcagatatagatatacagatttcctttaatcaaaccgcttggcaaagtcctaatattacaccttatttaaatgatgatccagtaggtggaatagcaactttttataatactactggtgaatcccaacattttactaaagatagtctactcttccaaagaggttttaacaatattcgggttaacaatggatttggtggtgccactatttctggtcatatgaaagcaaatgtaattgataatccttcttaaaaattaaggttcattttaaaaacttcaggttacaacgtttactattttaaatttacaaactaagggggccgcgtaatggtactatcacgtatagtcaatcccattttcaccgagcaagaagatttaaataatattataacgcaaatcaatgctctattcgtttctagtacacaagataaattaaaaccaggtgtgagtgattattggatcgaggaaattgtactgaaagtggatgccttatcagatgaggtatttggaacagaaaagaaggctttacgtaaattggtgaatcaggcaaaacgtttaagtaaagcaagaaatcttctgataggcggtagttttgaaaattgggatgcatggtataaagggcaaaaagtagtaagattatcggatcacgaactgttgaagagtgatcatgtattattaccaccaccaggattgtctccatcttatattttccaaaaagtggaggaatctaaattaaaagcaaatacacgttatacggtttctggatttattgcgcatgcaacagatttagaaattgtggtttctcgttatgggcaagaaataaagaaagtggtgcaagttccttatggagaagcattcccattaacatcaagtggaccagtttgttgtatcccacattctacaagtaatggaactttaggcaatccacatttctttagttacagtattgatgtaggtgcattagatgtagacacaaaccctggtattgaattcggtcttcgtattgtaaatccaactggaatggcacgcgtaagcaatttggaaattcgtgaagatcgtccattagcagcaaatgaaatacgacaagtacaacgtgtcgcaagaaattggagaaccgagtatgagaaagaacgtgcggaagtaacaagtttaattcaacctgttatcaatcgaatcaatggattgtatgacaatggaaattggaacggttctattcgttcagatatttcgtatcataatatagacgcgattgtattaccaacgttaccaaagttacgccattggtttatgtcagatagatttagtgaacaaggagatatcatggctaaattccaaggagcattaaatcgtgcgtatgcacaactggaacaaaatacgcttctgcataatggtcattttacaaaagatgcagccaattggacggtagaaggcgatgcacatcaggtagtattagaagatggtagacgtgtattacgattgccagattggtcttcgagtgtgtctcaaacgattgaaatcgagaattttgatccagataaagaatatcaattagtatttcatgggcaaggagaaggaacggttacgttggagcatggagaagaaacaaaatatatagaaacgcatacacatcattttgcgaattttacaacttctcaacgtcaaggactcacgtttgaatcaaataaagtgacagtgaccatttcttcagaagatggagaattcttagtggataatattgcgcttgtagaagtccctatgtttaacaagaatcaaatggtcaatgaaaataaaggtgtaaatataaatagcgatacaagtatgaacaacaatcaa

SEQ ID NO: 281 - DNA, 2097 bp, synthetic construct
  source 1..2097: mol_type = other DNA
atggcaaccatcaacgagctgtacccagtgccctacaatgtactcgctcacccaatcaaggaagtagacgatccttatagttggtctaacttgctgaagggaatccaagagggctgggaggaatggggaaagacgggccagaagaagctctttgaggaccatttgacaattgcgtggaacctgtacaagaccggaaagttagattacttcgcactcactaaggcttcaatcagtctgattggcttcatcccaggagccgaggctgcagtccccttcatcaatatgtttgttgacttcgtttggccaaagttgttcggcgccaacacagaaggaaaggatcaacagctcttcaacgcaatcatggacgctgtgaataagatggtcgataacaagtttctgtcctacaacttgtccacgctcaacaaaaccatagagggcctccaaggaaacttgggcttattccagaatgccatccaggttgctatctgtcaaggatctactcccgagcgcgtcaatttcgaccagaactgcacaccatgcaatcctaaccagccatgcaaggatgacctcgatagagtggccagtcgattcgacaccgctaactcacagtttacccagcatcttcctgaattcaagaatccatggagcgatgagaactccacgcaagaattcaagagaactagcgtcgaactcacacttcctatgtacaccactgtggccacactccaccttctcttgtacgaggggtacatagagttcatgaccaaatggaacttccacaacgaacagtacctcaacaaccttaaggttgagttgcagcaactcatccactcatacagcgagactgtgaggacatcttttcttcagttcttgccaaccctcaataaccggtcaaaatctagcgtcaacgcctacaatcgttacgtgaggaacatgactgttaactgtcttgacatcgctgcaacatggccgaccttcgatactcacaattaccaccaaggtgggaagttggacctcacacggatcatcctttcagataccgccggtccaatcgaggagtacactactggagacaagacctctggtcccgagcactccaacatcactcctaacaatatcttggatacaccgtcccccacctatcagcattctttcgtcagcgtggactccattgtctattctaggaaggagctccagcaacttgatatcgctacttacagcacaaacaactccaataactgccatccttacgggttgagactctcttacaccgacggtagcagatacgattacggagacaaccagcctgatttcactacatccaataacaactattgtcacaattcttacaccgcaccgattactcttgttaacgccagacacttgtacaacgctaaaggaagcctacagaatgtggaatccctcgtggtctctacagttaacgggggtagcgggtcctgcatttgcgacgcatggattaactatttgcgtcccccacaaacctctaagaacgagtccaggcctgaccagaaaatcaacgtgctatacccaattactgagacagtgaacaagggtaccgggggcaatctgggagtaatctcggcttacgttcctatggagttggtgccagagaacgtcattggtgacgtgaacgcagacaccaagttgcctctgacacaattgaaggggttcccattcgagaagtatggtagtgaatacaataaccgtggaatctcgctcgttagagaatggatcaatggaaacaacgcagtcaagctgtccaattcgcagtccgtcgggatacagattaccaatcagactaaacagaagtacgagatccgttgccgatatgcttcaaagggggataacaatgtttacttcaacgtggacttgtctgagaacccctttcgcaatagtatttcattcgggtccacagaatcatctgtggttggcgtccaaggggagaacggcaagtacatcctcaagagtattaccactgtggagatcccagccggatcattctatgtccacattacaaaccagggctcctcagacctgttcttggataggatcgaattcgttcctaagattcagtaa

SEQ ID NO: 282 - DNA, 3393 bp, Bacillus thuringiensis
  source 1..3393: mol_type = genomic DNA
atgattcaaaaaaactatgaaattataggtgcttcaacaaacggcataaccgaattacctgaagattacaacactatagtcagcccctatgatgctccagcatccgttactacaactattgaaattactggaaccatactaagcgatttaggtgtttcaggggcatcatcagttagtttacttttgaataaacttttaaatatattatggccaaataatgccaatactgtgtgggggacattcgcaaaagagaccgctgatcttctaaatgaagtgttatctgtggatgatccagtagtaatagaagcaaatattaatttagaagggctaaaaagcacccttgatttatatttagaggcacttaaagaatggaaaaatgatccccaaaatccagcatcccaagagcgtgtcagaactagatttcgtaatgtggatgatgattttacacatgatatgccttcctttgctagagctggatatgaaacgaagctattaacagtttatgcacaagctgcaaatcttcatttacttttattaagagatgcttctatgtttggagaaggttggggaatgtctcaagtaaacataaatgataactataatcgccaattacgattgacggctcaatatacggatcatagtgtaaagtggtataacgcaggactagaaaaattaaaagggaattcaactagggaaaattggtatacttgtaatagatttcagagagaaatgacgttaatggtgttagacgtagttgcattatttccaaactacgatacacgaatgtacccgatcgcaacgtcatcagaacttacaagaatgatttatacagatccaattgcttatacacaaagcgatccatggtacaagataacatctctttctttttcaaatattgaaaacagtgcgattccaagtccatctttcttcaggtggctaaaatccatttcaattaatagccagtggtggggcagtggtcctagtcaaacctactattgggttggacatgaattggtatattctaattcaaattataatcaagcacttaaggttaaatatggagaccccaattcttatattgagccccctgattctttcagcttttcttctaaggatgtttacagaaccatctctgtcgttagaaattcaataagtaattatatagtaagtgaagttcaattcaattagtaatacacataaaattagtgagaaatttataaacatcaatcaaattgggatagaagagaaacaaaagattcaattactgaactatccttagctgctaatcccccaacaacatttggaaatgtagcagaatacagtcatagattagcatatatttcagaggcataccaaagtcacaacccatcaaaatacccaacctacatacctgtattcggttggacgcacacaagcgtacgttacgataataaaatttttccggaaaaaatcactcaaattccagctgttaaaagcccttcagctgaaggttgatcatggcaaaatatagtaaaaggtcccgggtttactgaaggagatgtgacaactgctgtttcgccagcaactgtaaccgacataataaaaatacacgttactctagatccaaattcactttcacaaaaatatcgtgcatgacttcgctatgcttccaatgcatttgtagcagctacattgtatacaaatacaagtagtaattataattttgaacttacagaaagtacaactgaacagtttacaacatataattcatacaagtatgtagatattccaggttcaatacaatttaataatacttctgatacagtgtctgtttatttgcatatggattcaacaactaatgcaaccgttcatgtagatagaattgaattcattccagtagatgaaaattacgataacagagtaagactagaaaaagcacagaaatctgtgactgccttgtttacagcgggaagaaatgcactccaaacggatgtgacagattttaatgtagatcaggtttcaattttagttgattgtataccacgggcattatatcctaatgagaaacgcgaactactaagtttagtcaaatatgcaaaacgtttgagctattcccgtaatttcctcctagatccaacattcaattctatcaattcatcagatgagaatggctggtacggaagtaatggtattgcaattggcagtgggaatattttattcaaagggaactatttaattttctcaggtgccaatgatgaacagtatccaacctatctctatcaaaaaatagacgaatctaagttaaaagaatatacacattataaactgacaggttttatcgagagtagtcaggatttagaagcatacgtgattcgttatgatgcaaaacatcaaacaatggatgtatccaataatctattctcagatattactcctgtaaatgcatgcggagaaccaaatcgttgtgcggcactaccatacctggatgaaaatccaagattagaatgtagttcgatacaagatggtattttatctgattcgcattcgttttctctccatatagatacaggttcaattgatttcaatgagaacgtaggaatttgggtgttgtttaaaatttctacacctgaaggatatgcgagatttggaaacctagaagtgattgaagatggcccagtcattggagaagcattagcccgtgtgaaacgccaagaaacgaagtggagaaacaagttaacacaactgcgaacggaaacacaagcgatttatacacgagcaaaacaagccattgataatttattcacaaatgcacaggactctcacttaaaaataggtgctacatttgcgtcaattgtggctgcaagaaagattgtccaatccatacgtgaagcgtaaatgtcatggttatctatcgtcccaggtgtaaattatcccatttttacagaattgaatgagagagtacagcaagcatttcaattacatgatgtacgaaatgtcgtgtgtaatggccgattccttaatggaacatctgattggattataacctctgacgtaaaggtacaagaagaaaatgggaataacgtattagttctttccaattgggatgcgcaagtattatacaatgcatgaagctctatcaataccacggatatatcttgcgtgtaacggcacgtaaagaaggattgggagaaggatatattacaattacggatgaagaagggcatacagatcaattgacatttggtgcatgtgaggagatagatgcatcctaacacgttcgtatccacaggttatatgacaaaagaactagaatttttcccagatacagagaaggtgcgtatagaaattggagaaacagaagaaatattccaggtggaaagtgtagaattatttttgatgaaagatctatgttaa

SEQ ID NO: 283 - DNA, 3525 bp, Bacillus thuringiensis
  source 1..3525: mol_type = genomic DNA
atgagtccaaataatcaaaatgaatatgaaattctagatgcttcatcatctacttctgtatccgatagttctgttagataccctttagcaaacgatcaaacgaccacattacaaaacatgaactataaagattgtctgagaatgtctgagggagagaatcctgaattatttggaaatccggagacgtttattagttcatctacggttcaaactggaattggcattgttggtcaagtactgggggctttaggggttccatttgctggacagatagctagtttttatagtttcattgtcggtcaattatggccatcaagtaccgtgagtgtatgggaaatgattatgaaacaagtggaagatctaattgatcaaaaaataacagattctgtaaggaaaacagcgcttgcaggactacaaggattaggagatggcttagacgtatatcagaaatcacttaagaattggctggaaaatcgtaatgatacaagagctagaagtgttgtggtgacccaatatatagctttagagcttgattttgttgctaaaatcccatcttttgcaatatctggacaggaagtaccattattatcagtgtatgcacaagcagcgaatttacatttgctattattacgagatgcttccatttttggagcagagtggggattcacaccaggagaaatttccacattttatgatcgtcaggtgacacgtaccgcccaatactcggattattgtgtaaagtggtataacactggcttagataaattaaaaggtacgaatgctgcaagttggctgaagtatcaccaattccgaagagaaatgacattactggtattagatttagtagcgttatttccaaactatgacacacgtacgtatccaatcgaaacaacggcccaacttacacgggaagtgtatacagatccaatagtatttaacagagaaacaagtggtggattttgtaggcgttggtcacttaacagtgatatttctttttcagaagtcgaaagcgctgtaattcgttcaccacacctatttgatatactcagtgaaatagaattttatacaacaagagcggggcttcccttgaataatacggaataccttgaatattgggtaggacattctataaaatataaaaatacgaatgcctcatcagcattagaacgtaattacggtacgattacttctaacaaaatcaagtattatgatttagcaaataaggatatctttcaggttcgatcattaggggcggatttagctaattactacgcacaggtatatggagttccgtacgctagttttacactgcttgacaagaatacaggatcaggatcagttggaggttttacgtactcaaaaccacatacaactatgcaagtatgtacacaaaattacaatacgattgatgaaatccctccagagaatgagccacttagtagagggtatagccatagattatctcatatcacctcttattctttttctaagattgctagtagtcctgctagatatggcaatctccctgtatttgcttggacacatcggagtgcggatgttacaaatacagtttattcagataaaattactcaaattccagttgtaaaagggatcgacctcgggagcacaagtacgattgtaaattttgaatacaatggaggaagtatagtcaaagatactaaatcatcaactcataataactctctttcacgaatagtgagtttaatgataaaaaccgaggatccaaatccaaattcccgctctttatatcgtattagggttaagtatgctgctgatgtgcctggaactttccgactgcatattcaaaatacttccccggttacagtaccctttactgcgacgatgagcggtactaatttacaatacagttcctttaaatatatagaatatataggttactttaataatagagaagttggtttttctattgagtcaagtacatcacagggtagaacacgtaatgtatatatcgacaaaatcgaattcatcccggtagatgcgacatatatagcagaagaagacctagaggtggcaaagaaagctgtgaatggcttgtttacgaatacaaaagatgccttacagacaagtgtaacggattatcaagtgaatcaagcggcaaacttagtagaatgcctatccgatgagttatacccaaatgaaaaacgaatgttatgggatgcagtgaaagaggcgaaacgacttgttcaggcacgtaacttactccaagatacaggctttaataggattaatagagaaaacggatggacgggaagtacgggaattgagattgtggaaggagatgttctgtttaaagatcgttcgcttcgtttgacaagtgcgagagagattgatacagaaacatatccaacgtatctctatcaacaaatagatgaatcacttttaaaaccatatacaagatataaactaaaaggttttataggaagtagtcaagatttagagattaaattaatacgtcatcgggcaaatcaaatcgtcaaaaatgtaccagataatctcttgccagatgtactccctgtcaattcttgtggtgggatcgatcgctgcagtgagcaacagtatgtagacgcgaatttagcactcgaaaacaatggagaaaatggaaatatgtcttctgattcccatgcattttctttccatattgatacaggtgaaatagatttgaatgaaaatacaggaatttgggtcgtatttaaaattccgacaacaaatggatacgcaacactaggaaattttgaattggtagaagaggggccattgtcaggggaaacattagaacgagcacaacaacaagaacaacaatggcaagacaaaatggcaagaaaacgtggggcatcagaaaaagcatattatgcagcaaagcaagccattgatcgtttattcgcagattatcaagaccaaaaacttaattctggtgtagaaatgtcagatatgttggcagcccaaaaccttgtacagtccattccttacgtatataatgatgcgttaccagaaatccctggaatgaactatacgagttttacagagttaacaaatagactccaacaagcatggaatttgtatgatcttcgaaatgctataccaaatggagattttcgaaatggattaagtgattggaatgcaacatcagatgtgaatgtgcaacaactaagcgatacatctgtccttgtcattccaaactggaattctcaagtgtcacaacaatttacagttcaaccgaattatagatatgtgttacgtgtcacagcgagaaaagagggagtaggagacggatatgtgatcatccgtgatggtgcgaatcagacagaaacactcacatttaatatatgtgatgatgatacaggtgttttatctgctgatcaaactagctatatcacaaaaacagtggaattcactccatctacagagcaagtttggattgacatgagtgagaccgaaggtgtattcaacatagaaagtgtagaactcgtgttagaagaagagtaa

SEQ ID NO: 284 - DNA, 3525 bp, Bacillus thuringiensis
  source 1..3525: mol_type = genomic DNA
atgagtccaaataatcaaaatgaatatgaaattatagatatggcaccttctacatctgtaaccaatgattctaacagatacccttttgcgaatgagcccacaaatgcattacaaaatatgaattataaggattatttaagaatgtctgagggatattctcctgaatatttaacaagcctaagtccttacagccagtttggcacagttgataagatcatcagtattattagtctattgaatagtgctgcaggtattcctggtcttgatttttttactggattgctgcaatttattcttgacttctttgcaccagaggatccgtgggcagagttaatggaactagtggaacaactcatagatcaaaaaataacagttgctacaagagaaaaggcgctcgcagaattaagaggactgataaatggataccttgtatatcagcaatcattagaaagttggctggaaaatccaaatgctacaagagctagtatagttcgagaacaatatgtcgctttagaacttgattttgttacttcgatttcatcttttgcgatagctggacaggaagtaccgttattagccgtgtacgcacaagctgctaatttacatttgttattattgagagatgtgtcaatatttggagaagaatggggattaacagtaaatgaggttaataccttctatattcgtcaaatgacttatacaactgagtatagtgattattgtgtaagaatttataatactggcttaaataaattaaaaggatctagtgcatctagttgggttgattataatcgctttcgtagagaaatgaacttactagtactagatattattgcgttatttccaaactatgatgttcgtaggtatccaatggaaacaacaacggaattaacaagagtagtttacactgatccaattgtgtttgacgaaaggaagggggtggcgtcgactcatagttggacggcgattgcaccatctttctcaagtatagaatctctaactcgacgaccaggattatttacatggttagatcaactaactattttttcgaaacgcatatcgcaacctagtgtatttataaatagttgggcggggcataagattagcacctttagaacacaaaaaacagatatactcataaataccacccatggagatactaataatcctataaaagaatttgtagtagataccaaaaaagtagaagatatttatcaaacgatagcatacccacatgcagtagcaaatgaagtattctatttattcggtgtcccaaaagttgattttaatatggtacctgcaggtggctctgcaaactctgcacacaccctcattttttctgatagtacgggagggagactggaaagtattacgaagaactcagaagcagaattacctccaacagagtcattatcagatacacctcaaccaaaccaagtaacttattctcacagattagattatgctacaataattaaagcaaataaaagttatggaagtgggtatattccattattaggttggacccatcggagtgtagatcgtaataatacaatttatccgaataaaatcactcaaataccagcagtaaaagctttctcatatactgaatcatttaatgtaaatgttattgcaggtccaggattcacaggaggagatttaataagtttaggtcatttagagaatatttatatgaaattaaacgttccaaatcctcaaaaattccgtgttcgtattcgttatgctgctagtacaacttcgtatttgcaaataactgggctatctaatttagctcagtctgatcgtttcgaacagacgtattctaatgaaaatgaaaacaatttgatgtttgaaaattttcaatatgtagaacttagaaatattttttcggtagatgctccattagaaaatcatcaagtaagtatacaaaattatcaaggtaatggttttgttattatagaccgaatcgaattcatcccagtaaatgcaacatatgaggcagaacaagatttagattcggcaaagaaagcagtgaataccttgtttacgaatacaaaagatggtttacgaccaggggtaacggattatgaagtgaatcaagcggcaaacttagtggaatgcctatcggatgatttgtatccaaatgaaaaacgcttgttatttgatgcagtgaaagaggcaaaacgactcagcgaggcacgtaacttactacaagatccagatttccaagagataaatggagaaaatggatggaccgcaagtacaggaattgaggttgtagaaggagatgctctatttaaagggcgttatctacgcctaccaggtgcgagagaaatggatacagaaacgtatccaacgtatctgtatcaaaaagtagaggaaggtgtattaaaaccatacacaagatatagattgagagggtttgtcggaagcagtcaaggcttggaaatttccacaattcgtcatcagacgaaccgaattgtaaaaaatgttccagatgatttattaccagatgtacctcctgtaaactctgatggtagaatcaatcgatgcagcgaacaaaagtatgtgaatagccgtttagaaggagaaagaggattaccaaatgggaatcgttctgctgaagcgcatgaattctctctccctattgatataggagagctggattacaatgaaaatgcaggaatatgggttggatttaagattacggacccagagggatatgcaacactcggtaaccttgaattggtagaagagggaccattgtcaggagacgcactagaacgcctgcaaagagaagaacaacagtggaagcttcaaatgacaaaaagacgtgaagagacggatagaaaatatacggcagcaaaacaagcggtagatcgtttatatgcagattaccaagatcaacaattgaatccaaacgtagaaattacggatattactgcggcccaaaacctgatacagtccattccttatgtatataatgaaatgttcccagaaatacaagggatgaactatacgaagtacacagagaaaacaaatcgactccaacaagcgtggggtttgtatgatcaacgaaacgccataccaaatggtgatttccgaaatgaattaagtaattggaatacaacatctggtgtaaatgtacaacaaatcaacaatacgtctgtcttagtcatgccaaactgggatgggcaagtttcgcaacagtttacagttcaaccgaatcaaagatatgtattacgagttactgcaagaaaagaaggggtagggaatgggtatgtgactatccgtgatggtggaaatcaaacagaaacgcttacgtttagtgcaagcgattataacacagatagtgtgtataatacgcaagtgtcgaatacaaatgggttgtacaatgagcaaacaggatataccacaaaaacagtgacattcatcccatatacagatcaagtgtggattgagatgagcgagaccgaaggtatgttctatatagaaagtgtcgaattgattgttgacgtagagtaa

SEQ ID NO: 285 - DNA, 3474 bp, Bacillus thuringiensis
  source 1..3474: mol_type = genomic DNA
atgagtccaaataatcaaaatgagtatgaaattatagatgcgtcatcacctacttctgtatctaataactcagtgaaataccctttagcaagtgatcaaacgaccacattacaaaatatgaactataaagattatctgagaatgtctgagggagagaatcctgaattatttggaaatccagagacgtttattagtgcgcaggatgcggttggaactgggattgatattgtgagtaaactactaggtagtttaggggttccacttgttgggcaagccgcaacggcacttaaatggattataggtaaattgtggccttcttcaggaaacccgtgggatgatttgatgacggcagtagaagaactcataaatcaaaaaatagaagcatatgcaagaagtaaggcacttgctgaattgggtgtttcgggaagagctgtaaaatcctatcaaaccgcacttgaagagtggcaaaaaaacccgaataacgcgcgaagcgcagcacttgtaagggaaagattttcagatgcagaacatacattgcgtactcaaatgagtttatttaccgttcgtggttatgaaattccgcttttagcaacatatgcacaagctgccaatttgcatttgtttgtaatgaaggatattcaaatttacgggagagaatggggatatactcagggagatattaaccttttctatcgagaacaagtagaatttacaggggaatactctgattattgtgttaagtggtacaatgctggcttagataaattaagaggctcgactgctctacaatggattaactataatcgtttccgcagagaaatgacagtgatggcactggatatagttgcattattcccaaattatgacatacgcatgtatccaatgaaaacaaccgcagaattaacgcgaagaatttatacagatccgcttggttatacgggaagtgggtctaacacgccaccatggtataattatggatattctttctcatggatagaaaataatgccatgccagcacctggattgttccagtggttacaaggaattgggatttatactaaatttgctcgtataactccattttatgcgaactattggtcaggacatactgtattttataaatttactaacgattctactgagagacgtgttcagtatggagatacagatactccagaattagatagttcttcctttgaaaatgttgacatttataaggtttcagcatcagttggttcgtacaaaagtaataccgtactattaccaacttttaaagctacttttgagggggtaaatcaaaataatcagttaaagacctttaggtatcaaaaagaatctaatgtcccaagtcaaacgaaaaactcaaccacagagctgcctgttcagttatcaactccgcctacttacggagattctgaacagtacagtcatagactagcctatgtttttgatgccccaatcgattcatatacaggcatatatcgcatgtatggatttgcccctattcttggttggacacatattagtgtaagtcgtgacaataggattgatccagataaaattactcaaattccagctgtaaaggcatatgctgagggtcttgctaattatatcaaagatccggggtttacaggaggagatttattagctttaggtagaaactcaaatacttcattgattgttaatttttcgaagcctcaaacataccgtattcgtattcgttatgctgctagtaaaacttcgtattttcaactacgtgggctgcataatatagctcagtctcagcgtttcgaagcgacgtattctaataaaaatgaaaacgatttgacatttaacgattttaaatatgtagaaattcaaaaaactgtttcaatagacaatccatcagaaagtcgtagtataagtatatacactcaatcagatacagaattacttattatagacaaaatcgaattcatcccagtagatgcaacatttgaagcggaacaagacctagatgtggcaaagaaagcggtgaatggcttgtttacgaatacaaaagatgccttacagacaagtgtaacggattatcaagtcaatcaagcggcaaacttagtagaatgcctatccgatgagttatacccaaatgaaaaacgcatgttatgggatgcagtgaaagaggcgaaacgacttgttcaggcacgtaacttactccaagatacaggctttaatgtaataaatggagaaaacggatggacgggaagtacgggaattgaggttgtggaaggagatgttctgtttaaagatcgttcgcttcgtttgccaagtgcgagagagattgatacagaaacatatccaacgtatctctatcaacaaatagatgaatcgcttttaaaaccatatacaagatatagactaagaggttttataggaagtagtcaagatttagagattaaattaatacgtcatcgggcaaatcaaattgtcaaaaatgtaccggataacctcttgccagatgtacgccctgtcaattcttgtggtggagtcgatcgctgcagtgaacaacagtatgtagacgcgaatttagcactcgaaaacaatggagaaaatagaaatatgtcttctgattcccatgcattttctttccatatggatacaggtgaaatagatttaaatgaaaatacaggtatttgggtcgtatttaaaattccgacaacaaatggatacgcaacattaggaaaccttgaattggtagaagaggggccattatcaggagacgcactagaacgcttgcaaagagaagaacagcagtggaagcttcaaagaaccaaaagacgtgaagagacggatagaaaatatatggcagcaaaacaagccattgatcgtttattcgcagattatcaagaccaacaactcaattctggtgtagaaatgtcagatttgcttgcagctcaaaaccttgtacagtccattccttatgtgtataacgaaatgttcccagaaatccctggaatgaactatacaaatttcacagagttaacaaacagactccaacaagcatggaatttgtatgatcttcgaaatgctataccaaatggagattttcgaaatggattaagtgattggaatgcaacatcagatataaatgtgcaacaactaaacgatacatctgtccttgtcattccaaactggaattctcaagtgtcacaacaatttacagttcaaccgaattatagatatgtattacgtgtcacagcgagaaaagagggagcaggagacggatatgtgatcatccgtgatggtacaaatcagacagaaacactcgcatttaatacatgtgataatgatgcaggtgttttatctactaatcaagctagctatatcacaaaaacagtggaattcacaccatctacagagcaagtttggattgacatgagtgagaccgaaggtgtattcaacatagaaagtgtagaactcgtgttagaagaagagtaa

SEQ ID NO: 286 - DNA, 2094 bp, Bacillus thuringiensis
  source 1..2094: mol_type = genomic DNA
atgaatccatatcagaataagaatgaatatgaaatattggatagttcacaaaataactttaatatgtctattaatcatttacaatatccattaaaaaatagtccatatcctcaattttctatagacaattgtaggcgtagtaatactgctacttgggttaataatattggggatgcagttagtgaatcaatatctttggtgtcaacaatattggggatttttacagaacctaatttgtggggagtattttctgcattaattggtcttctagataggatgagaggtgctctgggaacaccttctatagctgcattatctatatgtgatttgctagaaattattgatgaacgagtaaatcggagtgttttgaatgacggaatcgctgattttaatggttcattagctctatttggaaatttcttgtccgcattaaattcctggagaaataatccaaacaatagtactgctgatgagcttcgttttcgttttagagcatctgattcagaatttgataggagtttaacaaatggatctttaacacatggtggttcattagctagacaggatgcacaaatattattattaccttcttttgcaaaagctgcatattttcacttatttttattaaatgaggctattacaagtggatctaattggggtctggagattaggcctactataaattatcaagaaaaattagaaaatagtattagaaattacaccaattattgtgtacattggtacaatcagggtttagaggaaatacgccgccggaataatagtggtgaaaattggttagtatttcacagattccgtagagatatgacattgcaagtattagatctagtagcaacatttccgaattttgatactaatcgatattctacttcaatgccaataactactcaattaagtagggtgatttatacagatccaatcggttgtgtaagtcaatcccatctaaatagtaattggtttggcccagtaaatggtactaattttacaagtttagaaaatgaaattcctagtcctaccctttctcaatttttaaattctatagatttagttgatcagccgcttagatggggtgttggaactaatggaggaaatacatggcaaggaaatacaaatagttttaatttttcctcttcatctactgttttccatgaaagttatggaagacgaactggtcagaatattatccgtgggctgaatggtagggatgtttttagaatagattcgagacctatttctctagatggtcatacattcggagttaatagagtagaatttcatcatactactagttctcaaaactctatatatacaggatatttgagaacatccggacttaatagaccagtggttcagaatgtccggacgtttttaccaggagaaaattctgatataccaaatcgagaagattatactcatagattaagtagggtagcaaatataacaggtgggcttcgacatgtagcagttcgtgaggatcaaagttcttctttattgttatatggctggacacataaaagcttaactcgtgaaaatatgtataatcttaatgaaatttttcaaatacctgctgtaaaaacaatgaacacacctggtattcaagtaattgcaggacctggatctacaggtggggatttattaagactaaatcttggtgctagagtaacttataattgtagacctgctcgtccattagaaacaccaatggtagtacatgtacgtgttcgttatgctagtgtaggaagttctacaataagaatagagtttactgatccatctggttcatttaatccacaaacacttgctttacctgatacaaattcatcattaaataatcttcaatatcaaaatttcaacatggttaccactaatttcgcacgtggtacgagtataatgcaaggtaatttttcaataagtattataaatatgaatggagctaatttagctttagataaaattgaaattataccggttcgtattggtcgaaacacctcagaacaagtaaaagaatttattgataaactgggttgtgttgcaaagtttgaaaaatatagttatagtttaagcggttctgaataa

SEQ ID NO: 287 - DNA, 2028 bp, Bacillus thuringiensis
  source 1..2028: mol_type = genomic DNA
atgaatccatatcaaaataagaatgaatatgaaatattcaatgctccatccaatggttttagcaagtctaataactattctagatatccattagcaaataagccaaatcaaccactgaaaaacacgaattacaaagattggctcaatgtgtgtcaagataatcaacaatatggcaataatgcggggaattttgctagttctgaaactattgttggagttagtgcaggtattattgtagtaggaactatgttaggagcttttgctgcccctgtcttagctgcaggtataatatcttttgggactttgttgccgatcttttggcaaggatctgaccctgcaaatgtttggcaggatttgttaaacatcggaggaaggcctatacaagaaatagataaaaacataattaatgtactaacttctatcgtaacacctataaaaaatcaacttgataaatatcaagaatttttcgataaatgggagccagcacgtacacacgctaatgctaaagcagtacatgatctctttactaccttagaacctataatagataaagatttagatatgttaaaaaataatgctagctatcgaataccaacactccctgcatatgcacaaatagctacttggcacttgaatttattaaaacatgctgctacctattacaatatatggctgcaaaatcaaggtataaatccaagtactttcaattcatctaattactatcagggctatttaaaacgtaaaatacaagaatatactgactattgtatacaaacgtacaatgcaggactaactatgattagaactaatactaacgcaacatggaatatgtataatacttaccgtttagaaatgactctaactgtgttagatcttattgctatttttccaaattatgacccagaaaaatatccaataggagttaaatctgaacttatcagagaagtttatacgaatgttaattcagatacatttagaaccataacagaactagaaaatggattaactagaaatcctacattatttacttggataaaccaagggcgtttttacacaagaaattctcgagacattcttgatccttatgatattttttcttttacaggtaaccagatggcctttacacatactaatgatgatcgcaacataatctggggagcggttcatggaaatattatttctcaagacacatccaaagtatttcctttttatagaaacaaacctattgataaggtcgaaattgtcagacatagagagtactcagatataatatatgaaatgatatttttttcgaatagcagtgaagtatttcgatattcatccaattcaacaatagaaaataattataaaagaactgattcttatatgattccaaaacaaacatggaaaaataaagaatatggtcatactctatcgtatataaaaactgataattatatattttcagtagttagagaaagaagaagagttgcatttagttggacacatactagtgttgatttccaaaatacaatagatttagataacatcacccaaatccacgctctaaaagctttgaaggtaagttctgattcgaaaattgtgaaaggtcctggtcacacaggtggagacttggtaattcttaaagatagtatggattttagagttagatttttaaaaaatgtttctcgacaatatcaagtacgtattcgttatgctactaatgctccaaagacaacagtattcttaaccggaatagatactataagtgtggagctccctagtaccacttcccgccaaaacccaaatgctacagatttaacatatgcagattttggatatgtaacatttccaagaacagttccaaataaaacatttgaaggagaagacactttattaatgaccttatatggtacaccaaatcattcatataatatatatattgacaaaatcgaatttattccaatcactcaatctgtattagattatacagagaagcaaaatatagaaaaaacacagaaaatagtgaatgatttatttgttaattaa

SEQ ID NO: 288 - DNA, 1941 bp, Bacillus thuringiensis
  source 1..1941: mol_type = genomic DNA
atgaattatatggaagatagttctttagatactttaagtatagttaatgaaacagactttccattatataataattataccgaacctactattgcgccagcattaatagcagtagctcccatcgcacaatatcttgcaacagctatagggaaatgggcggcaaaggcagcattttcaaaagtactatcacttatattcccaggttctcaacctgctactatggaaaaagttcgtacagaagtggaaacacttataaatcaaaaattaagccaagatcgagtcaatatattaaacgcagaatatagggggattattgaggttagtgatgtatttgatgcgtatattaaacaaccaggttttacccctgcaacagccaagggttattttctaaatctaagtggtgctataatacaacgattacctcaatttgaggttcaaacatatgaaggagtatctatagcactttttactcaaatgtgtacacttcatttaactttattaaaagacggaatcctagcagggagtgcatggggatttactcaagctgatgtagattcatttataaaattatttaatcaaaaagtattagattacaggaccagattaatgagaatgtacacagaagagttcggaagattgtgtaaagtcagtcttaaagatggattgacgttccggaatatgtgtaatttatatgtgtttccatttgctgaagcctggtctttaatgagatatgaaggattaaaattacaaagctctctatcattatgggattatgttggtgtctcaattcctgtaaattataatgaatggggaggactagtttataagttattaatgggggaagttaatcaaagattaacaactgttaaatttaattattctttcactaatgaaccagctgatataccagcaagagaaaatattcgtggcgtccatcctatatacgatcctagttctgggcttacaggatggataggaaacggaagaacaaacaattttaattttgctgataacaatggcaatgaaattatggaagttagaacacaaactttttatcaaaatccaaataatgagcctatagcgcctagagatattataaatcaaattttaactgcgccagcaccagcagacctattttttaaaaatgcagatataaatgtaaagttcacacagtggtttcagtctactctatatgggtggaacattaaactcggtacacaaacggttttaagtagtagaaccggaacaataccaccaaattatttagcatatgatggatattatattcgtgctatttcagcttgcccaagaggagtctcacttgcatataatcacgatcttacaacactaacatataatagaatagagtatgattcacctactacagaaaatattattgtagggtttgcaccagataatactaaggacttttattctaaaaaatctcactatttaagtgaaacgaatgatagttatgtaattcctgctctgcaatttgctgaagtttcagatagatcatttttagaagatacgccagatcaagcaacagacggcagtattaaatttgcacgtactttcattagtaatgaagctaagtactctattagactaaacaccgggtttaatacggcaactagatataaattaattatcagggtaagagtaccttatcgcttacctgctggaatacgggtacaatctcagaattcgggaaataatagaatgctaggcagttttactgcaaatgctaatccagaatgggtggattttgtcacagatgcatttacatttaacgatttagggattacaacttcaagtacaaatgctttatttagtatttcttcagatagtttaaattctggagaagagtggtatttatcgcagttgtttttagtaaaagaatcggcctttacgacgcaaattaatccgttactaaagtag

SEQ ID NO: 289 - DNA, 1941 bp, Bacillus thuringiensis
  source 1..1941: mol_type = genomic DNA
atgcaaaataacaactttaataccacagaaattaataatatgattaatttccctatgtataatggtagattagaaccttctctagctccagcattaatagcagtagctccaattgctaaatatttagcaacagctcttgctaaatgggctgtaaaacaagggtttgcaaaattaaaatccgagatattccccggtaatacgcctgctactatggataaggttcgtattggggtacaaacacttttagaccaaagattacaagatgacagagttaagattttagaaggtgaatacaaaggaattattgaggtgagtaaagtttttactgattatgttaatcaatctaaatttgagactggaacagctaataggcttttttttgatacaagtaaccaattaataagcagattgcctcaatttgagattgcaggatatgaaggagtatccttttcactttttactcagatgtgtacatttcatttgggtttattaaaagatggaattttagcaggaagcgattggggatttgctcctgcagataaagacgctcttatttgccaattcaatagatttgtcaatgaatataatactcgactgatggtattgtactcaaaagaatttggacggttattagcaaaaaatcttaatgaagccttgaactttagaaatatgtgtagtttatatgtctttcctttttctgaagcatggtctttattaaggtatgaaggaacaaaattagaaaacacgctttcattatggaattttgtgggtgaaagtatcaataatatatctcctaatgattggaaaggtgcgctttataaattgttaatgggagcacctaatcaaagattaaacaatgttaagtttaattatagttatttttctgatactcaagcgacaatacatcgtgaaaacattcatggtggcctgccaacatataatggaggaccaacaattacaggatggatagggaatgggcgtttcagcggacttagttttccttgtagttatgaattagaaattacaaaaataaaacaggaaataacttacaatgataaagggggaaatttcaattcaatagttcctgctgctacgcgcaatgaaattctaactgctaccgttccaacatcagctgatccattttttaaaaccgctgatattaactggaaatatttctctccgggtcttttctctggatggaatattaaatttgatgatacagtcactttaaaaagtagagtaccaagtattataccttcaaatatattaaagtatgatgattattattttcgtgccgtttcagcctgtccaaaaggcgtatcacttgcatataaccatgattttttaacgttaacatataataaattagaatatgatgcacctactacacaaaatatcattgtaggattttcaccagataatactaagagtttttataggagcaactctcattatctaagtacaacagatgatgcctatgtaattcctgctttacaattttctacagtctcagatagatcattcttagaagatacaccagatcaagcaacagatggcagtattaaatttacggatactgttcttgggaatgaggcaaaatattctattagactaaatactggatttaatacagctactaggtatagattaattatacgttttaaagcgcgtgctcgtttggctgctggtatacgtgtacgttctcaaaattcagggaataataagttattaggtggtattcctgtagagggtaattctggatgggtagattatattacagattcatttacttttgatgaccttgggattacaacttcaagtacaaatgctttctttagtattgattcagatggtgtaaatgcttctcaacaatggtatttgtctaaattaattttagtaaaagaatccagttttacgactcagattccattaaaaccatag

SEQ ID NO: 290 - DNA, 4391 bp, Bacillus thuringiensis
  source 1..4391: mol_type = genomic DNA
gaaaattcgagaattaatcagacatgcaggcgccaaaaacgtagtattggatggcagagatggagtaatgaatatctctatggtgtactagggctctattgggactggaaagttcgtccccttgaaagctcaggaagatattgataaaagtgtctgccatttgataggtctcataacccttttgatgaagtttatggggtgagctgcttgagggaaaacctcacgagcagttcttatggggaggggctggaaacgggttataactgataccgcgccagtcctttacccgacaacgaacttttgcttggttagaaaattaccgcaggctttggaaaaactgtgaacgaacacttgaaaatagcagacaaagttgcttattggcagctgtggctattttattaaaaagattccaaacaggttctcagaaaatagttgtaattcatcttgaatcgaaagattcataaaaaacgtcatcctttctagctttttagaaagaataacgttttttgacacttgggggtagtcttatttcttaagttgatgggcatgcaacagaaccctaaaaaatcaataattcaacaaaaataatggggatatttgttgaattattgcaacaggaatacatacgtagattgcgaatatttagaagtacaccctacatattattggttaggtggaatgaattataaaaaatgatgggaataagggaggaacgaagatgcattattatgggaataggaatgaatatgacatattaaatgcttcatcaaacgattcaaacatgtctaatacttatccgaggtatccgttagcaaatccacaacaagatttaatgcaaaatacaaattataaagattggcttaatgtatgtgaagggtatcatatagaaaatcctagagaagcaagcgttagagctggacttggtaagggattaggtatagttagtacaatcgtagggttctttggtggttctattatcttagatacaattggattgttttaccaaatttcagagctactttggccagaggatgatacccagcaatacacttggcaagatattatgaatcatgtagaagatcttatagacaaacgaataactgaggttatacgaggaaatgcaattagaacattagcagatttacagggtaaagttgatgattataacaattggttgaagaaatggaaagacgatccaaaatctacaggtaatttaagcaccttagtaaccaagtttacggctcttgattcagattttaatggtgctataaggacagttaataatcaggggagtccaggttatgagttacttttattgcctgtctatgcacaaattgcgaatctgcatttacttttattacgggatgctcagatttatggagataaatggtggagcgcacgagctaatgctcgtgataattattaccaaatacaattagagaaaacaaaggaatatacagaatattgtataaattggtataataagggtttaaatgattttagaacagcaggtcaatgggtaaactttaatcgttatcgtagagaaatgactcttactgtattagatattatttcaatgttccctatttatgacgcgagattatatcctacagaagtaaaaaccgaactaactagggaaatttattcagatgttattaatggggagatatatggacttatgactccttatttttcttttgagaaagctgaatcactttatacaagggcaccccatctcttcacttggctaaaaggatttcgatttgtaaccaattctatttcttattggacatttttatcaggtggtcaaaataagtattcttatactaataattctagtattaacgagggctcttttaggggacaggacacagattatggtgggacttcttctaccattaatattccatcaaattcgtatgtatataatttatggacggaaaattatgaatatatttatccttggggtgatcctgtaaatattacaaaaatgaatttttctgtaacagataataattcttcaaaagaattaatttatggtgcacacagaacgaataaacctgttgttcggacagattttgattttctcactaataaagagggaactgagttagcaaaatataatgattataatcatattttatcctatatgttaattaatggggaaacgtttggtcagaaacgtcatggttattcgtttgcttttacacatagtagtgttgatcctaataataccattgcagcgaataaaattacgcaaattcctgtagtgaaagcttcgagtataaatggatcgatttcaattgaaaaaggtcccggatttacgggaggagatttggtaaagatgagagcagattcaggtttaactatgcgttttaaagctgaattattagataaaaaatatcgtgttcgaatacgttataaatgtaactacagttctaaattaatactacgaaaatggaaaggggaaggttatatacaacaacaaattcacaatatttctcccacatatggagccttttcttatttagagtcttttactataactacgacagaaaatatatttgatttgacaatggaggtaacatatccgtatggtagacagtttgttgaagatataccatctcttatattagataaaatcgaattcctcccaactaactgataccattcacaggaaatatgaggaaaaatatgaattagaaagatcacaggaaacatttaatagtatatttgttgattaaaacaaagtactaacgtagatggtatagctgtttgaaaaaataagaaaaaaggttgtgaattttatgcttacaagtggtgcgaaaaatatgttaaaactcgaaacgacagattatgaaatagatcaaatggcgaatgctatagaaaatatgtcaggtgaacaatattcacaggaaaaaatgatgcaatggcatgacataaaatatgccaaacaattgagtcaagcacgtaatttacttcaaaatggtgattttgaggatttatttagtggatggactacaagtaatcagatgtccattcaggcagataatgcaacttttaaagggaactatctgcatatgtctggggcgagagacatatatggaacgatattcccaacgtatatataccaaaaaattgatgaatccaaattaaaaccgtatacgcgttatctagtcaggggatttgtgggaagtagtaaagatctagaattaatggtaatgcgttatggaaaagaaattgatacagtaatgaatgtaccaaatgacataccgtacgtaccttctatgccggtctgtaacgaattatatgatggtcaacaaccgtatccaaataggcatgtaggatattataatccaatgccagtttctcagccttcttacacatccgatacttgtcagtgtacgcccggcaaaaaacatgtggtatgtcatgattctcatcaattcaagtttcatattgatacgggggaagtagattacaatacaaatctaggaatttgggtgttgtttaaaatctcttcacccgatggctacgcgacattagataatttagaagtaattgaagagggaccagtaagaggcgaagcagtgacacatgtaaaacaaaaggaaaagaaatggaatcagcaaatggagaaaaagcgcatggaaacaaagcgagtctatgaccgagcaaaacaggcggtagatgcattatttacaggagaagagttaaactatgatgttacattgtcacacattaagaacgccgatgatttggtacagtcgattccatatgtacacaatgagtggttaccggattttccaggcatgaactatgatatataccaagagttaaacgcgcgtatcatgcaagcacgctatttatacgatgcacgaaatgtcataacaaatggggattttgcacaaggattacaagggtggcatgcggaaggaaaagtagaagtacagcaaatgaacggaacgtctgtattagtcttatccaattggagctctggagtatctcaaaaccttcatgtccaacatccacatggatatctgttacgtgtgagtgcgaaaaaagaagggtctgggaaaggctatgtaacgaggatgagttgtaatggtaagcaggaaacacttacgtttacgtcctgtgacggaggatatatgacaaaaacggtagaggtattcccagaaagtgatcgtgtacgaattgaaattggggagaccgaaggttcgttttatattgaaagcatcgaattgatttgtatgaacggatatactagcaataataaccagaatatgagtaatatgtatgatcaaagttatagtgggaattatagtcagaatactagcgatatgtatgatcaaggaggttctgttgcaaagtttgaaaaagaatagaat

SEQ ID NO: 291 - DNA, 3668 bp, Bacillus thuringiensis
  source 1..3668: mol_type = genomic DNA
gactttttttgactatatgcatggcctctattccaacaatcatttttgtagctgtgcgccatgatttgaatccaagcatattccagattcattttttgataaatctatggtcttgttcaattatgttgtttacatatttttttacccgtagcggcatatcatttggtatatttttttcattttttaattctcgtatcgcaacaggataggctttatcaccatcaattgtgattacacgaggttttgtgacatgacaagaagccaatgctttctttagaaaacgcttggtagccttcgcatctcgtttcttacccaaataaaaatcaagggtgtttccttcggaatcgacagcaccatataggtacattttttcgcctttgatttttaggtatgtttcatcctgatcacgcacctttttttagtagtagtaccagtatggccaagttagaaaaatcattttcaagtttttttatgcttttgtaccagaaccgaatatttacctagatctataaatacgtataagattgataaatgttatacattctttcaattacttagtagtgacttccttaagcctacacataatatggattatagaaatattagtatagtgggaggaatcaaaatgaattcttatcagaataagaatgaatatgaaatcttagatgctaagcgaaatacttgtcacatgtctaattgttatcccaagtacccattagcaaatgatcctcaaatgtatttgcgcaacacccattataaggattggataaatatgtgcgaggaagcttcttatgcatcttcaggtccttcacaattatttaaagttggaggttctatagttgctaaaattcttggaatgattcctgaagttggtcctcttttaagttggatggtatctttattttggccaactattgaagaaaaaaatactgtttgggaagatatgataaagtatgtagcaaatctgctaaaacaagaattaacaaatgatacacttaaccgtgccactagtaatttatctgggttaaatgaatctttgaatatatataaccgagctctcgctgcgtggaaacaaaataaaaataatttcgcaagtggtgaacttataaggtcatatataaatgatcttcatatactctttacaagagatattcaatcagatttctcattaggaggttatgaaacagtattattaccttcatatgcaagtgctgccaatcttcatttacttttgttacgtgatgttgcaatttacggaaaagaattaggatatccatcaactgacgtagagttttattataatgagcaaaagtactatacagaaaaatatagtaattattgtgtaaatacgtacaaatcgggtttagaatcaaaaaaacaaataggatggtcagattttaatcgatatcgtagagaaatgactttatccgtattagatatagtcgcattattcccactgtatgatacaggactgtatccgagtaaagatggcaagatacatgttaaagctgaactaacaagagaaatctactctgatgttattaatgatcatgtatacggactcatggttccctatatatcttttgaacatgctgaatctctgtacactcgcaggccgcacgcatttacttggttaaaaggatttagatttgtaacgaattctattaatagttggacctttttatcaggtggtgaaaatagatatttccttactcatggagagggtactatttataatggaccttttttggggcaggatactgaatatggaggaactagttcttatatagatatctctaataattcctctatttataatttatggaccaaaaattatgaatggatttatccatggactgatccagttaatattacaaaaataaatttttctataacagataatagtaattctagtgagtctatttatggtgcggaaagaatgaataagcctactgttcgaacggattttaattttcttcttaacagagcaggaaatggtcctacgacatataatgattataatcacattttatcttatatgttaattaatggagaaacgttcggacaaaaaagacatggttattcatttgcatttactcatagtagtgtagataggtataataccattgtcccagataaaattgtgcaaatacctgctgtgaaaactaatttggtcggtgcgaatataataaagggtcctggtcatacaggtggcgatttacttaaactagaatatgagcgttttcttagtttacgtattaagcttatagcatcaatgacttttcggattagaattagatatgcttctaatatttctggacaaatgatgattaatataggttaccagaatcctacttattttaatattatccctacgacaagtagggactatactgagttaaaatttgaagatttccaattagtggacacatcctatatttactcaggtggcccatcgattagttcaaatacattatggctggataatttttctaatggacctgttattatagataaaattgaatttataccgttgggaattacactaaatcaagcacaaggttatgatacatacgaccagaatgctaatggtatgtatcatcaaaactacagcaattctggctataattataatcaagaatacaatacttattaccaatcgtataacaattaggttgtgttgcaaagtttgaaaaaacacaaccttgtgtgcaaaatatagttatagtttaagcggttctgaataactcctgtaattccttgtacgtcgaaaaagagaagtctggaatgtgacttctcttttgtttgtatatcgcatgaatcgtttcgattcctttcaatgtacgtgaagcatggcggagattttgaaatcctgcggatttaacaaaacggcgcttgatatgtctatgatcttgttcaatgagattatttagatgcttaacggtacaatgtttcgtatgtacatacaaaccgttatgtttcagttttttgagcgcacaaagtaaagcaggagccttgtctgtagtaagaaccgttggttctccaaaatctttaaccagtcgcttcataaacatataagcggcttgatgattgcgtgttttacgaagttgaatatccaaagtatgcccatctccaccaatagcacgataaagatagcgccattcgcctttcactttgatgtaagtctcatctaaatgccatatgaaatgtgcggatttgtttttctttttccaaatttgataaatcagattgccgtattcgtgaacccaacgcatgatggttgttggatgaactgatattccacgttctttcaagatttcagatacatcacgatagcttaaagaaaaacgacaatagtagccaacggctaccaaaataatatcttttttgaattgttttcccttaaaatatcccatgtgatatgctcctcatcccattttctctatataagttccgtttaatattttaacaattgttcagtccctaacctttgaagtaccttttcaggaaattgagaaagatgttctagaaaagaaagaacggatgtttttatttctttctgggatgcatgaaaacgattagagataacactttcttttaatgctttccaaatacgttccaataaattcaaattgggagaatacggcggtaaaaagacgagtgttgac

SEQ ID NO: 292 - DNA, 4807 bp, Bacillus thuringiensis
  source 1..4807: mol_type = genomic DNA
gcttcatttaaaaaactttgcaacagaacctcagtacatttgtttctttttatacgcacatatacatgcctgttttgcatataatattttggtgatattcttcataaaaaaggagtgattttattggtacagttatctgatttattacctagttattataatgtattagcttctccccctacaattttagatgctaaccaagactggttccccacaggtaatgatttcaaaagtgtaataaatgagctgaaagatgcttttactaaatttcaaaaagattttcatactagcgaccttattaacactatacaatccatttataactcttatggctctcaaggaatggattgggtcaatgtggctcaagctgtaataacttttgcttttggttttgtacccggtggatcattagtctctgcaggacttaataaaataataggtatatttttccccaaagaccctaatcctactgtatttgatcaaataaaagccgcagtagaacaattaatactcaattcatttatcacatatgatatacagggcgatataactgaattgaataaactgaaagattattctggaatattagcaaattctatacaagtagcgcttggtcaatcccaatttcaagaattccaacaagtaaatcctactgggccaccgacaaattgtactcataccccctcttgtactttagatccaactaaccctattccaccaaattgtagctgtttattgaattttgtatatcaaaattataataatcacacttccgatataaacacggtattacttcaaatagaaggttctattccaaagatttttgctcttattaatcaatccacaacagcaactactgctcaaaaaaaccaactaaaatctgattatttacaagcatatcttcctttatatgtaatgggcgcaactttagaaatgatatactatagaacatatattcaatttgctgaaacatttcagtatggtttaagtgaacaaaatagtactacactaacggctatgcacaacttacgtcttacaatttctagacgaactacatttctattcaataattttctcccatttttaccaagtataacttcaaatacaaaaggagatttaaattcatatattcaatatacaagacgtataacaataaatgctctggatactgctgtattttggactttactagatccatttgattatcctgtgtccgcaaatcaaacattatcccgtattatttttaatgatattgtaggaccagtagaatgtaaagctggtaaccaaaatagcaataacttactattcaatttttataacgtagatgggcaaccacttccaaataactctattactaattatttttataataatatgcaattaagaggtttgcaattccaaatatataaatatagttcaacctctacttatttctcgacaacatctgatattccaattggatttaaagcttcttatcgtacaaatggtagcgataaaaatattgatcatacacgttctctaccatacggactaaaaggatctacaacaacattaactgatgatatatatatcacgaatcctagttttaatattataaatatgaactcctctcaaacatcaggtcaaattgctacagatgtctcacaaattctatatacacctatttcagatataaaacaaaattgtttttctcaaaacagtccttatttagggaataatagaattcaagctatttatcctctacaacccactaatccaaacacttataatgcttatggtagtacagataaactcggatttttaactacactcatttcaaatgacaccactacaaaccttgtatttacttctgatcctatttatacatttcctgccgaacaagctactgtattatctggaacaaaacttgttgaatatgtgaatggtacagcttctgttcaattacaaaatgggcaaaatgctcaatacacgatagataatacaacaagaattgcaggtcctacacaatttcaattacgagtacatgtagcgacagatccagcagttacagatccaaatgttttaggacaactcgctattacaattgataatcaacgaacacaatatttaactatacccaatacaaatgttgattatagtaatccaataactcttttaaacggtcaacaacttaaccaattacgggtaaaaggaacacaaggtgcttatatgttagtacccgctagtaatctaaataatatcaatgatcgtaataccaatgtttttacattaaatccaaatgcatctatgaatgtaaatattcaaaatacaggaaatctaacagttatattagatcgtattgaattcgttcctatcgattcaacagtaataatcccagcacaaacactatattcaaatcaagcttatactctttgggaatcaacaaatggattaattggaaaacaggctttattagtagtagatgattatttacattttactgttcaatattattaccaatctcaattagtccattctaatgaacaaaatatatatgatgttaattatattggtctatttgataaaattacggctagtactatcgctgatactttagtaaaccttacaaatggaattgtttatttaactactaatacaacaccaacaccaacaccagctgtaccaagcccaattcctcctatatccaatcaaaatataggagctggatttgaatatactgtttgggatggtaataacaaaactggaaataccgtaaattttcaaggattcgctgcaccaaatagtggttccgaaggtttattatttcaatataaatataatgatcaagtaattgacacagatcaagtatcaaaccaattttctatccaacgtaaattagcaggtacaattaataaaattacagcaacaggtggaacaccaaatggagtgtatttaacgataaataatggtggttccgtgagtacaacataaaaaggaggaaaataaaatgaatccatgttctccattccaaaatatacctcaaaggaatttaaatcttcctgtttttattacaaaacaagaattagaacaaattactaaaatggtatctaacttatttttaacaacaaatcctgctttattacattgtttaccacctgatattacgttattagctcctcatgttagtgattattggattgatcaattactaatgaaagttgataaactgtcaactgaattatatggtgtcgaaaaacaagaattacgaaaattattaaatatagccaaacaaatgagtgttgcacgaaataaattaataggtggaaactttgaaacagtagaggcttggacattcggtacacaagcaactgttctttccaattcacctttatttgtagggaattttctatctttagaacctacaaatggtatatggacttcctacgcatttcaaaaaattaatgaatctcaattaaaaccatttacacgttatagtatttctggttttatcgctaatagtcaagggttagaacttacaatttcacgatacggaacagaattacaaactgttataaacattccaattgaaacagcacttcctatttatccaaatccaattccaaattgttgccagccaagtccatgtggatgcgattcttgtcaatatagagattcacatctttttaactattcaattaatgtaggtactttatttccagaattaaatcctggtattgaaattagtttacgcataatcgaaccaaacggaagagccagaattagtaatttagaagtaatagaagagcgtcctcttacagaagaagaaagaagacaaattcaacgaacagaacaattatggctaacaagagtagaaagagaactaaaaatcatttgtgatttatttgaaccaattattaaacaaattaactcctactttccagaaggggattggaacaatcacattttttctcatgtcacatatcaagatttatatagtattgtcataccggcactcccgatcattgaaaattggtctatgacgcatttgacaggtatgtataatcatctagtacgaccgattaaagaagtgatccaacaaattgaacaacaattagaagctcgaaatttacttcataatggaaatttttcaaatggactgacagattggactgtttgtggtgaagcaaccataatacctttaacaaatcaaaatcaagctttattcctttcttattgggattctatggtttcacaaactgttacagttgtaaattttaatccagataaattgtatttattacgtatctatgcaaaaggaaatggaactgttcttgttcaacataatggacacacagaacgtgttaacttcacacaagatttcttccaatcaaaagaacatactttttatctagatatggcaacctttaccgtagatattcaatccaattcaaatgattttacagtagattatgtagaaattatagaaatataaaataaacaaaactacatgtttttacttcatgtagttttttctctctttcttactctattcaagaaacgaggtgattgtatgcaaaaaaaaacaattttaataaattcttcttccacttctagcccctctccttccacctcttctttttcttcttctcaattactacaacaaggatataccaaaaaacaaggttgtaattgtaataaatagacaaacaaaaatagtgtatttaaaaaagttgcaaagtttgagaaatcataagtctgtttacaaaatactcttgtcatttaagcggttctgaataatggctataattctttctacgtcgcaaaagag

SEQ ID NO: 293 - DNA, 2169 bp, Bacillus thuringiensis
  source 1..2169: mol_type = genomic DNA
atgaaagaacaaaatctaaataaatatgatgaaataactgtacaagcagcaagcgattatatcgacattcgtccgatttttcaaacaaatggatctgctacatttaattctaataccaatattacaactttaacacaagctataaatagtcaagcaggagcaattgcaggaaagactgctctagatatgagacatgactttacttttagagcagatatttttcttggaactaaaagtaacggagcagacggtattgcaatcgcatttcatagaggatcaattgggtttgttggaacaaaaggcggaggacttggaatattaggtgcacctaaagggatagggtttgaattagacacatatgcgaatgcacctgaggacgaagtaggcgattcgtttgggcatggggcaatgaaaggatcattccctagtttcccaaatggatatccccatgctggctttgtaagtactgataaaaatagtagatggttatcagccctagctcagatgcagcgaatcgctgctccaaacgggcgttggagacgtctggagattcgttgggatgctcgtaataaagagttaactgcaaatcttcaggatttaacttttaatgacataactgttggagagaagccacgtactccaagaactgcaacttggaggttagtaaatcctgcatttgaacttgatcagaagtatacttttgttattggttcggcgacgggtgcatctaataacctacatcagattgggattatagaatttgatgcatactttactaaaccgacaatagaagcgaataatgtaaatgtcccagtgggagcaacatttaatccaaaaacatatccaggaataaatttaagagcaacagatgagatagatggggatttgacatcgaagattattgtgaaagcaaacaatgttaatacgtcgaaaacgggtgtgtattatgtgacgtattatgtagagaatagttatggggaaagtgatgaaaaaacaatcgaagtaactgtgttttcaaaccctacaattattgcaagtgatgttgaaattgaaaaaggggaatcttttaacccactaactgattcaagagtaggtctttctgcacaggattcattaggcaatgatattacccaaaatgtaaaggtaaaatcgagtaatgtggatacttcaaagccaggggaatatgaagttgtatttgaagtgacagatagctttggtggaaaagcagaaaaagatatcaaggttacagttttaggacagccaagtatagaagcgaataatgttgaattagaaatagatgatttatttgatccattaacagatgcaaaagtaggtctccgtgcaaaggattcattaggtaatgatattacgaaagacgtaaaagtaaagttcaataacgtagatacttcaaattcaggaaagtatgaagttatatttgaagtgacggaccgttttggaaaaaaagcagaaaaaagtattgaagtccttgttctaggagaaccaagcattgaagcaaatgatgttgaggttaataaaggtgaaacgtttgaaccattaacagattcaagagttggcctccgtgcaaaagactcattaggtaatgatattacgaaagatgtgaaaataaaatcaagtaatgtggatacttcaaaaccaggtgaatatgaagttgtatttgaagtgacagatcgttttggtaaatatgcagaaaaaacaattggagttatagtgccagtaattgatgatgaatgggaagatggaaatgtgaatggttggaaattctatgctgggcaagatattaaactgttgaaggatcctgataaagcctataaaggcgattatgtattctatgattctagacacgttgctatttctaaaacaattccactaacggatttgcaaataaatacaaactatgaaattacagtgtatgctaaagcagaaagcggcgatcatcacttaaaagtgacgtataagaaagacccggcaggtccagaagagccgccagttttcaatagactgattagcacaggcacattggtagaaaaagattatagagaattaaaagggacgttccgcgtaacagaattaaacaaagcaccattgataatcgtagagaattttggagctggatatataggtggaattagaattgtgaaaatatcgtaa

SEQ ID NO: 294 - DNA, 3711 bp, Bacillus thuringiensis
  source 1..3711: mol_type = genomic DNA
atggacccaaatgatcataatgaatatgaagtcatggatactggcagcatgggctatcagccaaggtatccccttgcgaatgcacctggtgctgaattgcaacagatgcattacaaagattggatggatatgtgtacgtatggggaatcagtagcattatccgaggggcttagggctgcgctatttgttgctaatagtattatagggataatgctttcaaagattccaattgtgggtcctatagtatcaacaccctttcaaataatgggcgcagtacttccattcttgtggccgccaaacgcacccgaggcccaattttcatgggaaagcctgatgacagctgcggaagagattgctgataaaaagatcgacgcacaggtacgagctaatgcgaatgcagaattagaaggagttcataacgctatacgactctatcaagatgccgtttgcgattggaaacaagatcctaccaatgcccaactgaaggaacaactccgaatacaatatattgctacgaataccgttatctttagtagaatgccgtcttttcgagtacgaggatttgaagtcccattactcagcacttatgtgcaagcggctaatttacatttaatccatttaaaagatggagttcaatttggagaagaatggggaatggactcagcaacagttgatcgattttatagctacctaaaatcagatatagaaatctatacgaattattgtatagattggtataataaagggttatcggatagtatagaatctgaacccacttggaatggttggaatacgttcaataatttccgcagggatatgactcttatggtccttgatttagtttcgatatggccaacatatgacccgagacgctatccccttcctaccaaatcacaattgacacgagaattatatacacaagctatagggagttataaaagtgttgagcctcttctgccccctccatctccatttagatggttacgtgaaatagagttttttttaagagacagtcaggatgaggtggaacagtttgctggttttcaacaggggtatcaatacacgcttgacaccaccatctatcgtccaccagtagttggtacacggacttccctagttgatagtattgctatgggactgggttctgatgatgtagtgtatagaataaagaatatttcctacaatggatggtttccaaaaaaacttgatttttattatactccttccgaacgcgttgaaagtgtaggagagattcgtactgatgctaataatatgattgattatatcggacttggttgtagggcgaaggtgactgaaccttgtgatccttgtacgactaattgtacgattgatactgtgaatacaaccgcatcttgtgacaatcctaatctttatagccatcgattgtcatcgataaacccaagtgctccatacccgggtcaaaattggatgtttagcttttgctacggctggactcatttcagtgtagatgacaacaatttgatagcggctgacagcattactcaaatccccgcagtgaaagcctatagaatagggggatatggcaaagtaatgaaagggcctggttatacaggcggggatttaatggtgttttatggggcaggggaaatcaactggagacttaccattccggacacgacaaaggcttatcgagtgcgagctcgtgtggcaacaatccctacttctcagcctgtagatacagtgaggtataatcagtttgaatacagggatatagaagtaatatctccaacaactactgtacatgagtattccataggattcgatatcactggtgatgactgggggctgttggacaaaatcgaattcatcccaattgaaggatccgtggaagaatatgaagcagaccaagctttagaaaaagccagaaaggcagtgaacgccttgtttacaggtgatgcgaaaaatgccttacaattgaacatcacagattacgcagtggaccaagctgccaaccttgtcgaatgtgtatcagaggagttccatgcccaagaaaaaatgatcctcttagaccaagtcaaatttgccaaacgactcagtcaagcacgcaatctattaaactacggagactttgaatcgtcagattggtctggagagaatggatggagaacaagtcctcatgtccatgtcgcatctaatcatccaatctttaaagggcgctatctccatatgccaggtgcgacaagttctcagttttctaaccatatctatccaacttatgtatatcaaaaggtggatgaatcaaaattaaaatcctatactcggtacatggtacgcgggtttgtcggcaatagtaaggacctagaattactggtagaacgatatggaaaagatgtccacgtggaaatggatgtaccaaatgatattcagtatacgttaccaaggaacgaatgtggtggctttgatcgatgcaaaccagcatcctatccaacaagcacttctcacacatgcacatgtaaagatacggctccaatgcatacggattgtcagtgtcaggacaagatgaatcgtactttggcagatacgtatcacaatgaatcatcgagtcgtgtgatgtatgcggacggattccatgctcatacgtcctgtggatgtaagaacagtgacaggtatcaaaacggaacacgtccatctaaatcttgtggatgcaagaacccacatgtcttcacataccatattgacacaggatgtgtggatcaagaagaaaaccttggtttgtggttcgctttgaaaattgcgagcgaaaatggtgtcgcaaacattgataacctagaaatcattgaagcacagcagttaacaggagaggcgttagcgcgtgtgaaaaaacgggaacagagatggaaacaagaaatgacaaaaaaacgtttagaaacagagaaagctgtacaagcagcgcaaggtgcgattcagaatctgttcacaaacgcgcagcacaatcgtctgaaatttgaaacgctattccctcaaattgtccatgcagagaagctcgttcaacagattccctatgtgcatcacccattcttgagcggggcgctgccaactgtaccaggcatgaattttgaaatcatccaacaactattggcagtgatcggaaatgcccgtgcattatacgagcaacgaaatctcgtgcgtaatggtacattcagctcaggtacaggaagttggaaagtgacagaaggggtaaaagtgcagccattgcaaaacacatctgttcttgttctgtccgaatggattcatgaagcgtcccagcagttacacattgatccaaatcgcgggtatgtgttacgtgtaacagcgcgaaaagaaggcggaggaaaagggactgtaacaatgagtgactgtgcagactatacagagacactgacctttacatcatgtgactttaacacgtctggttcccaaacgatgacaagtggtacattatctggatttgtgacgaagacgctagaaatcttcccagacacagatcgtatccgtattgacatcagtgaaacagaaggtacgtttaaaatagaaagtgtggaactcatttgtatggaacacatggaagaccacatgtatgatatcgccggaaatgtggtggaagagatgcgttacctagattcatctcgttcgatgggtggtacattagatgcgatgtgttatacaaaaattggagagtttggttgttag

SEQ ID NO: 295 - DNA, 1158 bp, Bacillus thuringiensis
  source 1..1158: mol_type = genomic DNA
atgttagatactaataaagtttatgaaataagcaatcttgctaatggattatatacatcaacttatttaagtcttgatgattcaggtgttagtttaatgagtaaaaaggatgaagatattgatgattacaatttaaaatggtttttatttcctattgataataatcaatatattattacaagctatggagctaataattgtaaagtttggaatgttaaaaatgataaaataaatgtttcaacttattcttcaacaaactctgtacaaaaatggcaaataaaagctaaagattcttcatatataatacaaagtgataatggaaaggtcttaacagcaggagtaggtgaatctcttggaatagtacgcctaactgatgaatttccagagaattctaaccaacaatggaatttaactcctgtacaaacaattcaactcccacaaaaacctaaaatagatgaaaaattaaaagatcatcctgaatattcagaaaccggaaatataaatcctaaaacaactcctcaattaatgggatggacattagtaccttgtattatggtaaatgattcaggaatagataaaaacactcaaattaaaactactccatattatatttttaaaaaatataaatactggaatctagcaaaaggaagtaatgtatctttacttccacatcaaaaaagatcatatgattatgaatggggtacagaaaaaaatcaaaaaacatctattattaatacagtaggattgcaaattaatatagattcaggaatgaaatttgaagtaccagaagtaggaggaggtacagaagacataaaaacacaattaactgaagaattaaaagttgaatatagcactgaaaccaaaataatgacgaaatatcaagaacactcagagatagataatccaactaatcaaccaatgaattctataggacttcttatttatacttctttagaattatatcgatataacggtacagaaattaagataatggacatagaaacttcagatcatgatacttacactcttacttcttatccaaatcataaagaagcattattacttctcacaaaccattcgtatgaagaagtagaagaaataacaaaaatacctaagcatacacttataaaattgaaaaaacattattttaaaaaataa

SEQ ID NO: 296 - DNA, 1164 bp, Bacillus thuringiensis
  source 1..1164: mol_type = genomic DNA
atgatagaaactaataagatatatgaaataagcaataaagctaatggattatatgcaactacttatttaagttttgataattcaggtgttagtttattaaataaaaatgaatctgatattaatgattataatttgaaatggtttttatttcctattgataataatcagtatattattacaagttatggagtaaataaaaataaggtttggactgctaatggtaataaaataaatgttacaacatattccgcagaaaattcagcacaacaatggcaaataagaaacagttcttctggatatataatagaaaataataatgggaaaattttaacggcaggaacaggccaatcattaggtttattatatttaactgatgaaatacctgaagattctaatcaacaatggaatttaacttcaatacaaacaatttcacttccttcacaaccaataattgatacaacattagtagattaccctaaatattcaacgaccggtagtataaattataatggtacagcacttcaattaatgggatggacactcataccatgtattatggtatacgataaaacgatagcttctacacacactcaaattacaacaaccccttattatattttgaaaaaatatcaacgttgggtacttgcaacaggaagtggtctatctgtacctgcacatgtcaaatcaactttcgaatacgaatggggaacagacacagatcaaaaaaccagtgtaataaatacattaggttttcaaattaatacagatacaaaattaaaagctactgtaccagaagtaggtggaggtacaacagatataagaacacaaatcactgaagaacttaaagtagaatatagtagtgaaaataaagaaatgcgaaaatataaacaaagctttgacgtagacaacttaaattatgatgaagcactaaatgctgtaggatttattgttgaaacttcattcgaattatatcgaatgaatggaaatgtccttataacaagtataaaaactacaaataaagacacctataatacagttacttatccaaatcataaagaagttttattacttcttacaaatcattcttatgaagaagtaacagcactaactggcatttccaaagaaagacttcaaaatcttaaaaacaattggaaaaaaagataa

SEQ ID NO: 297 - DNA, 3727 bp, Bacillus thuringiensis
  source 1..3727: mol_type = genomic DNA
atgaattcatatgaaaataaaaatgaatatgaaatattgaatgattcaaaaaaatctaacatgtcgaacccttatttacggtacccactagcaaatgattcactagcttctatgcaaaatacgaattataaagattggttaaccatgtgtgatagaactgatactgatgttttaagcagcagaggtgcagttagtacgggggtgggtatgctttctacgattttgagcctttttggcattccacttatcggagaaggaattgatttattactaggagcggcagatttcctttggccagaatccgatggcggccatcaatacacctgggaagacttgatgaaccatatagaagagcttatggatgaacgattagaaactgaaaaaagaactactgcacttgacgatttacgtggtctaaaagctcttttaggtctattccgtgacgccttcgattcttgggaaaaaaatcaaaacgacccgatagctaaaaatagggtcggcggctattttgaagatgtgcatacccattttgtgaaagatatggcgtctatattttcagctacaaattatgaagtattactattacctgtctatgcacaagctgcaaatttacatttacttttattaagagagggagttatttacggaagccgatgggggatagctccagcagctgatttctatcatgaccaactattgaagtatacggccatatacgcaaaccactgtgttacttggtataataatggtttagctcaacaaaaagaactgttcgcaaaatcaccaaactggaaccgcttcaatgcatatcgtagagatatgacaattactgtattagatatcattgcattattcccaacttacgacgctcgtttgtatacaaaaccaataaaaacagaacttacaagagaaatctattcagatgtattgaatttagatgtatatggggtacagcagacagatttgaataaaaatgaggccgccttcacacggtccccacatttagttacaagattacgaggttttgatttttacacaagaactaagtatgcatattggagatatttggctggccatacaaattatttttcttttacgggtaatggtactatttattcaagttcatttaataactggtatgatacagatatgaccaagagtacaataaacattccagactatgctaatatttataagttatggacaaaaagttatacgaatatatctccctatacggacccagttggtatctcacaaatgcaattctctctaacaaataatcagcagttaacttatacgggtacgagtgccccaaagtatcctgtacgcgaaacgttctttgaaataccacctacggatgagaagccgctaacttatgaaaattatagtcacattttatcttacatgactagtgctcaacattttggagataaaaaaataggatatacatttgcttggatgcatgaaagtgtagattttgacaatcgtgttgatccagataaaatcacacaaataccggcggtgaaaggggattatcttcaatatggatatgttaagcaaggccccggtcatacaggcggagatcttgtgtctatgattcgtactgatcgtttagggataaatgtttattttcctcaaccactagactatcgtatacgtattcgctattcaacaagtagtaatggttatctatatatttattcacctaatactaaaatagtatatctcccacccacaaccttagtagatggtcaacctacttttgacccgatggacttcagtgcattcagagttgtagaagttccagctagttttcgtgcaagtgttgcgggctatacaaactttactattgaagcagggtttggcccagtatatatagacaaaatcgaatttatcccagataatacaacaactttagaatatgagggaggaagggacctagaaaaaacaaagaacgcggtgaacgatctgtttaccaattaaaacaaatgattaactagagtaggtggtatcgctgttaaaaaaataagcggaaaaggttgtgaatcctatgtttatcagtaatataaaaaatacgctaaaaatagaaacgacagattatgaaatcgatcaagcggccatttctatagaatgtatgtctaatgaacattcttccaaagaagaaatgatgttatgggatgaagtaaaacaggcaaaacaacttagctggtctcgtaatttactctacaatggtgactttgaagatgtatcaaacggatggaaaacaagtaatacgattgagatccgagagaatagtcccgtttttaaaggacattaccttcatatgtttggggcaagagatattgatggaaccctatttccaacttatatctaccaaaaaatagaagaatctaaattaaaaccatatacacgttatcgagtaagaggatttgtgggtagtagtaaagatctaaaattaatggtaacacgttacgggaaagaaattgatgccatgatgaatgttccaaatgatttggcctatatgcagcctaccccttcatgtggagattctcgctgtgaatcatcgtcccggtatgtgagccaagggtatcctacaccagtaacagatggatatgcttctggtaggtatgcatgccagtccaatcgaggtacaaagcatgtgaagtgtcacgatcgtcatccatttgattttcatattgacaccggagaattagatacaaatacaaacgtaggtattgatgtcttatttaaaatttctaatccagatggatatgctacattagggaatctagaagtcattgaagaagggccactaacaggagaagcattaacgcatgtgaaacaaaaggaaaagaaatggaaacaacacatggagaaaaaacgttgggaaacacaacaagcctacgatccagcaaaacaggctgtagatgcattatttacaaacgaacaagagttacactatcatattactttagatcatattcaaaacgctgatcgactgatacaggcgattccctatgtgtaccatgcttggttaccggatgctccaggtatgaactatgatggatatcaagggttaaacgcacgtatcatgcaggcgtacaatttatatgatgcacgaaatgtcataacaaatggtgactttacacagggactaacgggatggcacgcagcagggaaggcaatggtacaacaaatggatggcgcttctgtattagttctatcaaactggagtgcgggggtatctcaaaacttgcatgtccaagagcatcatggatatatgttacgtgtgattgctaaaaaagaaggacctggaaaagggtatgtaacgatgatggattgtaatggcaatcgggaaacactgaagttcacttcttgtgaagaaggatatatgacaaagacagtagaggtattcccagaaagtgatcgtgtacggattgaaataggagaaaccgaaggtacgttttatgtagatagcatcgagttgctttgtatgcaaggatatgctagcaataataacccgcacacgggtaatatgtatgggcaaagttataatggaaattataatcaaaatacgagcgatgtgtatcaccaagggtatacaaacaactataaccaaaactctagtaatatgtataatcaaaattatactcacaatgatgacctgcattccggttgcacatgtaaccaagggcataactctggctgtacatgtagtcaaggatag

SEQ ID NO: 298 - DNA, 930 bp, Bacillus thuringiensis
  source 1..930: mol_type = genomic DNA
atgatttttttggcaattttagatttaaaatctttagtactcaatgcaataaattattggggtcctaaaaataataatggcatacagggtggtgattttggttaccctatatcagaagcacaaatagatacgtctattataacttctactcatcctcgtttaattccacatgatttaacaattcctcaaaatttagaaactatttttactacaactcaagtattaacaaataatacagatttacaacaaagtcaaactgtttcttttgctaaaaaaacaacgacaacaacttcaacttcaactacaaatggttggacagaaggtggggcgatttcagatacattagaagaaaaagtaagtgtatctattccttttattggagagggaggaggaaaaaacagtacaactatagaagctaattttgcacataactctagtactactacttttcaacaggcttcaactgatatagagtggaatatttcacaaccagtattggttcccccagccaaacaagttgtagcaacattagttattatgggaggtaattttactattcctatggatttgatgactactatagattctacagaacattatagtggttatccaatattaacatggatatcgagccccgataatagttataatggtccatttatgagttggtattttgcaaattggcccaatttaccatcggggtttggtcctttaaattcagataatacggtcacttatacaggttctgttgtaagtcaagtatcagctggtgtatatgccactgtacgatttgatcaatatgatatacacaatttagcgacaattgaaaaaacttggtatgcacgacatgcaactcttcataatggaaagaaaatatctataaataatgttactgaaatggcaccaacaagtccaataaaaacaaattaa

SEQ ID NO: 299 - DNA, 750 bp, Bacillus thuringiensis
  source 1..750: mol_type = genomic DNA
atggaaaatttaaatcattgtccattagaagatataaaggtaaatccatggaaaacccctcaatcaacagcaagggttattacattacgtgttgaggatccaaatgaaatcaataatcttctttctattaacgaaattgataatccgaattatatattgcaagcaattatgttagcaaatgcatttcaaaatgcattagttcccacttctacagattttggtgatgccctacgctttagtatggcaaaaggtttagaaatcgcaaacacaattacaccgatgggtgctgtagtgagttatgttgatcaaaatgtaactcaaacgaataaccaagtaagtgtaacgattaataaagtcttagaagtgttaaaaactgtattaggagttgcattaagtggatctgtaatagatcaattaactgcagcagttacaaatacgtttacaaatttaaatactcaaaaaaatgaagcatggattttctggggcaaggaaactgctaatcaaacaaattacacatacaatgtcctgtttgcaatccaaaatgcccaaactggtggcgttatgtattgtgtaccagttggttttgaaattaaagtatcagcagtaaaggaacaagttttatttttcacaattcaagattctgcgagctacaatgttaacatccaatctttgaaatttgcacaaccattagttagctcaagtcagtatccaattgcagatcttactagcgctattaatggaaccctctaa

SEQ ID NO: 300 - DNA, 792 bp, Bacillus thuringiensis
  source 1..792: mol_type = genomic DNA
atgcaccttaataatttgaataattttaataatttagaaaacaatggtgaatatcactgttcaggacctattattaaaaaaccgtttaggcatattgcattaacagttccatccagtgatataactaattttaatgaaattttttatgtagagccacaatacattgctcaagcaattcgtttaacaaatacatttcaaggagctatagatccacttaccttaaatttcaattttgaaaaagctttacaaattgcaaatggtcttcctaatgcaggagttacaggaactattaatcaaagtgtaattcatcaaacaattgaagtttcagttatgattagtcaaattaaagaaattattagaagtgtgctagggctcgttatcaatagtgctaatttttggaacagcgtagtatctgctattacaaatacatttacaaatttagaacctcaagtagatgaaaattggattgtttggcgtaatttatcagctactcaaacaagttatttttataaaattttattttctattcaaaatgaagatacaggtagatttatggcaatattgcctatagcatttgaaattactgtggatgttcaaaaacaacaattattattcattacaataaaagatagtgcacgatatgaagttaaaatgaaagctcttactgtagttcaagctttagattcttataatgcacccattatagatgtatttaatgttcgtaactatagcttacatcgtccaaatcataatattcttcaaaatctgaatgttaatccaataaaatcgtaa

SEQ ID NO: 301 - DNA, 7305 bp, Diabrotica virgifera
  source 1..7305: mol_type = genomic DNA
acaactgacacataacgtcagtagttgtctattttcactggtgactaatttttgagaattagtaattggtttcgtatttttttcttaacaaaagggcaaaatgagcttttttggaaaattgttcggggggaaaaaggaagagatagcccctagtcctggggaggctattcaaaaactcagagagactgaagaaatgttaataaaaaaacaggattttttagaaaagaagatagaagaatttaccatggtagcaaagaaaaatgcgtcgaaaaataaaagagttgcactccaagccctcaaaaagaagaaacgattggaaaagacccaactacaaatagatggaacccttacaactattgaaatgcagagggaagccctcgaaggagctagcacaaatactgctgtattagattctatgaaaaatgctgcagatgcccttaagaaagctcataagaatttgaatgtagatgatgttcacgatatcatggatgacatagccgaacaacacgacatagccaacgaaatcacaaacgctattagcaatcctgtcggattcaccgacgatctggatgacgatgaattagaaaaagaattagaagagctcgaacaagaaggattggaagaagacctgctccaagtgccaggtccaactcaactgccggctgtgcctgctgatgcagttgctactaaaccaatcaaaccagcagctaaaaaagttgaagatgatgacgatatgaaagaattggaagcctgggcctcgtaaaattcctgaaatctggatatttgtaaacgaaatcacccatctaagatgaaaacattataaatatataggtaataacagctaaaaacgtttcaatgtagaacaagcttttgctgaaaaggcgtcttgcaaaaaatgttgataatttagaattctctatatattatatatttgccctttaaggaaagatttcttttatagtcatagttcaaccaaacgtttcataaattagaatacaggggtgtcagaattctacgtgaatttattgaaaaaaaagaactttccttaaagttggcataatgatatttttgaaattatgtaaataggtatatgtatgctcttactaacggttttaatattgggtttagaagcaccttaattttatttttatacaaggtagtaacattttttcattgtaatttgttaaaaaatattgtataacgcaaaaaatggtgtgataaagcaaaatattattgagtgcttattttcttattttattaaaagatcttatttacgttaaatctaaatatattgggtatctcagaatatgttaacaaaggtttcttgtatcaacagaaaaatacaaacttattcattattgtggttcatttgattatgcttgtgtatatttaatctgccataaacaagttttgataaatgtcactgctctgtactttttgtttttctgactgtagtttctgtcgtttgtaattccttggtctcggccatcgcccatacacacatagggaatgttgtataaaagaaatgatagtagactagcaatggcccgaacagcaagaattaaataattaaaatatggaaagactgaatactaagctgagattggtcaaagcccttatttttcctattgctatatacgcagctgaaacatggactctcaaaaaaatcaatcgaagtaagatcgaagccttcgaaatgtaggtctacagaattattgtacccgtgtcctggagagaacacagaaccaacctgtcaattctgaaagagcttcatataaaagacaaggtattaaaaaaagtataccgaccatacttaaattactttggtaaagtaacgattactatacgaagaggcaaatcgttactttgattactctgattacttcgtaccaatcgtatcagagcgagtaacgactattgtatctactttgattacttcgtatcagagcgaataacgactattgtatctactttgattactctgattacttcgtaccaatcgtatcagagcgagtaacaactattgtatctactttgattattctgattacttcgtaccaatcgtatcagagcgagtaacaactattgtcagggccgcgtttaggtcaaatgacgccctaggcaattctctagtagccgcccttcaaacatgtaccatttttgcgaaaaaaaatgcaagcagaattttttatttaaataagaatgttattgcacaaatctcggtgttcttcaaataatgtttagaaatgtgttaaaaatattctttattttacatcaggcgtaatgttacatattactattataagtatgtttgagcgtttggaactgtgtccaatgcatgcgttttaatgcatgatacgtagaaattgcctgtttgtagccgcacctacttgttcgattttaaatgagagatgcattgaaaacattactcaagcactatgtgtttatagctttgtttaacaataaaaaaattaatttttagcaatgcaaataatcaaaaccggtataatttgacatgcactttcaaatgcggtaagcagaattgctattttattttttaatcaaaagttattcggattcaaaaattgcaatttttcgatattttgaaagttcaaccgcgtctatctcgaaaactatgcatcctacgaaaaaactttaacaacattttttgcttagaatgacccaaaaaaaatagaaaaaaggtttgttttgctaagaatcactgttatgtaattcctcaagttctttgtttataataaccttatccggaaaaaattagactgttttaataaatatctagacaaattgcatatttgtaatgtacacaaaagtacatacaaattaaaagttctaaaaaaataaattttgtaattttatgtcaactatcttaattgagtgcaaaaaatgcaagaaatcgcgttgattgcactaaattgttaataattaaaaacagacgcgaactctaggcaggaaacaagtaggttttcatcctataggtcaacagtcaacaataactaaaaacgtagtcatctacctcaatatttcagtggcccgaacatggtctattttttgcttatttccctggagtaggtatatcagtgtgacgacactaaccttatctacttgtaataatacagtttgaaaatcccaaccctaactcgatgtcctactgtcgacaagtcaaatctttagtttttgcaaaatgtgcaatattgaagtgttcaatggcccaccgcatttgcccagctgccggcggcctaataatcactaaatttatgacttccatcctttttaaatgaatagtgttaagataacagaatgctatgtttgatttatttttgttatgaatgcagtttgttttattctatttagaaatgaatgccaacttctatttcattgatggatgaacatacagacttgttattcgattttaatttttatatacaaatatttttttgtacagtatttttgccgccctctcacaatttgccgccctaggcaactgcctatattgcctaatggatacagcagccctgactattgtatctacaacctgtacacttaaatactttctaccaatcgtatcccagcgagtaacggacgagacacgtattttacgagtgttatcgaatatcgttatcggtttgaaacgttttaagggtgtgagggtgaggagaagatagaagatgaaacagagggagatataatgtataggtaaaatatttaatgtatgtcgctaacaaagatcgaatgcgagaaccctatatttttatctcgatctatatctatacctatacaaaatacctacctactgagaaatacgattctcgatatgattaccggtactcaaatacaaaagtcatcatagtaatcaaagtaacgaatactgtaaatgattactttatacaaaagtaacgatttgtaacgaatactcgacagtaactataatcaacatcactaatagtcggaagaacgtggactatataattattaatattagaaggaaatgccgaagaccaagaagaagatctcgaacacgatggacagaccaaattaagactctggtgggaaaatcacaatatgaaagcgtccatctggcacaggatcgcagccattggatacagcaagctaacaatatttagagtatcaccacgccccgacaaaggctcaaggaatgaggaggagagggttttcatattgaaactaattgtaaaggtgcgtcaagatatgctccgaatgccgtatcgaacctcctcgcgaacttaaatgtggacggcaccctgcaacaacgtactgaacctcgtcgcgatcagggtgcaacatcgaactgttccactagtttccggtaaatccatccacatcaaagtaaagggtcgtcgaaaggttcagaacgaggtttgccgtaaattcacatgtggactagtttgcgaagcattcggcgtttcggtcattgttattttgaaattgagtgcatcaacatggaatgaatggatgagaattgtactactaatagaaaattatcgagaaaacgaaatattatgggaaccaaagagtcccagatattataacaaaataaaaaaataatgcataagtatataagctgatgcagcaacgtccatcttgcagtaaaggtgttaaggcaattactgatggaacatcaaaatgttcggttcgttgcttatttcaagaccccttgcgacaacgtcgcgaacctctgttgatcgcttcgatgttcgcgacgaggttcgatacggcatggcattcggagcatgtgtggacgcacccttagtacaacgagttttatttctgtagaagttttttgacagtttacaaacggtgcgctctatgcttgtatgaaaattaacttttttcttatggttgtatggttatcaaatactattgactgtaaaacatccaactcccacaaaaatctggaagcacgttgccactagcgccactgtcggcttgagttgaactacgttttgacaacgtaaaatttgacgtaaacattcaaatttaattttataaatttttgaataacgagctaattttgctaaattaaattaaaataaaaatagttcaaacacttatacaaaaacaattataaagccattttataaatgtaaggttagattgctctggttatcctactcataccgctagatggcgctatttttttgcttcctcaaagttaatgggaaatgtcaagagttgtgtgtattacagtctatagtatttggtgatagtacggactatgtcataattataatttatgaggccaatcctcgccaatgaagaagtacttcgctgaatgaccggcaaaaggcgttaaaattctgtaaaatgtacaactgacaattatagttcagcgcaaatttaagtacatgcagcatagctgcatgctgcatgattcgcgaggttagtgtgtagagatccagacagcagctgtagattaaaagaaattattatcatgatgcgataggatgcgatggaaaagcttatgggtaaactatgagttaacaaaaatcctcaaatcgatacaagggtttgcaaaagatagttgtaatacgatctaagcaaatcgtacaatagggatgtagtatagtattaatacagtacgaaagtatttattttatattcggtttaaaatttactaaaaataaaataaaatgtcgcgttttagggttttctattatagaaactaccgtttctcaaatatcaataaattttattcaacggtcttccaatgactccatcccgttttctttggtgttcgtctgaaagtgttgcaaatgtctctgttatagccgcaatggcttcttgtttggacgacaagcactgataagaaaaactgacttaaattttaaaaaacagatgaaattctaagagaatcaaacctggaatttagatgggtcttccattacttcatagtgtagatcctcctaatccaagatattttgtggacagtttcattgtcctggcagaaaaggattagtgatcatctcatgatcttgaccttgtagaaaactctatattgttgaattccgatgaaagatgtgcgatatctgagcgattccaagagcttatcagactaccttagtaaatcatgtacagtaagcgccaccctactagatacatgggtaggtacctaattgctatgtttatgtgctagtccggtccgttctcaaatgtgactttcatccctgtcatgttactgtcaagaaactattcaaaataattgtttttccgtacaaaaaatacattaattaatagtattagtactctgctttaaaataactttattcaaacaccaagaatattacaatactttaaaacttttacaaaacaaaatgacaactataaacgtcaaaattagatcagctgatctattatttgtcaacttcatatgttaatattgtccttttcatgatcatttttcagtgcgtaacaaatgataggagaaagggtaagtccgtgataatacacatttatgacatttattctaacatgacattttagttaaatctgacagttgtcacattttattttcaatttggaataaaaacaaagcaaatgtgtttcttgcatttataaaatggtattttctttgatttgtatagtgtatagtcttataaattatacagattatatttgtaatattattatctaattaaaaaaaattatttttttattatggcgccatctatcgacaactaaaataactagaagaaatgttataaaaatgtcaccgacgaaatgtaatcaccgacgtgcttttttttctgtctcatacaagttaatgtgttagaaagaaatcgaaaaactgtgacgcactgaaagatgatcatgagaaataatttattcagtttctatacattttctgacgttctaaacgtcactagacataaataaacaagtgaagggtccaggactgtaatagctctatgttcctatgtatctagtagggtggcgcgcactgtataattggattattattcaatttgtctactgtaacgtctcggttcttaatacaactcctggctttttttatttattttttgtatttttttttcagggaaccttttttatctagttatttttttataataatagtaaaccatgatttttatttttttcccaattgagtgcatagataaaagcgcgtttgcatatatgggacacccagtattaaaaaatatgcattacatttttctttacttggaccttgtgtacctgtaacctacattcaccaaattgtgttttgtattctaattttaaatacagtaatatattttgattcactta

SEQ ID NO: 302 - DNA, 1093 bp, Leptinotarsa decemlineata
  source 1..1093: mol_type = genomic DNA
cattattgggttggcgacactgtgaatgactaatagtagttggtctatcagccataatttgttgcttgtttagtgcaaatatgagttttttcggtaaattattcggtggcaagaaagaagatgaaggggcctcgcctgcagaggcaatacaaaaacttagagatactgaggaaatgctcattaaaaagcaagactttctggaaaagaagattgaagaatatactctaatagcaaagaaaaatgcatcaaaaaacaaaagagtggccctgcaagccctcaagaaaaagaagcgattagaaaaaaatcagttgcaaatagatggcactttaactactattgaacttcaacgagaagctctggagggagctagtacgaacaccacagtattggaatctatgaaaaatgcagctgaagctcttaagaaagcccataaaaacttggacgtggacaatgtgcatgacatcatggatgacattgctgagcaacatgatattgcgaacgaaatctctaatgccatcagcaacccagttggattctcagatgacttggacgatgctgagttggagaaagaactagaagaacttgaacaagaaggtctggaggaagatttactcaaggttcctggaccgacggaattgccagctgtcccaactggcgccattgccaagccagtcaaaccagctaaaaaagtggaggaagatgacgatatgaaagaactcgaagcttgggcctcataaaatgttcatggttgctaggtttgttgaaattttataaaaatatgtaggcacccatctaacccaagagattcaaagttattaatatatcactgaagtggagttgaatatcttgtttattggtggtgtaaataagaacccaactcttgatttctcctccgaaggcttgggatgcttctccataatgtatatatatcttttattttgtttacaaaggacaactagcagggtcctcaaaagattaaaactccatttgttaggaattatatatttttagcataattgcagtaatttcagagttgcctagatgcaagcttttggtaattcaaatttttctttaataataaagtatatttaca

SEQ ID NO: 303 - DNA, 488 bp, Leptinotarsa decemlineata
  source 1..488: mol_type = genomic DNA
atggtcggtatgggacaaaaggactcatacgtaggagatgaagcccaaagcaaaagaggtatcctcaccctgaaataccccatcgaacacggtatcatcaccaactgggatgacatggaaaagatctggcaccacaccttctacaacgaactccgtgtcgctccagaagaacacccagtccttctcactgaagctccactcaaccccaaagccaacagggagaagatgacccaaatcatgtttgagaccttcaacacacccgccatgtatgtagccatccaagctgtactctccttgtacgcttctggtcgtaccaccggtatcgtcttggactctggagatggtgtcacccacaccgtaccaatctacgaaggttacgctcttccccacgccatcctccgtttggacttggctggacgtgacttgaccgactacctcatgaaaatcctcaccgagaggggttactcattcaccaccacagctgaaag

SEQ ID NO: 304 - DNA, 2472 bp, Leptinotarsa decemlineata
  source 1..2472: mol_type = genomic DNA
gtcagctgactgtcttgtgacaaatttacttgcttggttaaaagttgatagtccgtcgtcttgcgagttgtgaattgactgggtgaggttgaaagtgatacaagtctacattcataatgtcgagattaattgctgatgaggaacaggaatcacagtatggatatgtccatgctgtatctggaccagtcgttacggccgagaaaatgtcaggatcagctatgtacgaattggttcgagtaggatactatgagttagtaggcgaaattatccgtctggaaggtgatatggccaccattcaggtatatgaagaaacttctggagtaacggtgggagatcctgtgttgcgtaccggtaaacctctatctgtggaacttgggccaggtattatgggttccatctttgatggtatccaacgtccgctgaaagacatctgcgacatgacggaaagtatctacattcccaagggtgtgaatgtgccttcactctccagaactatcaaatgggaattcaacccaatcaacatcaagttgggatcccacttgacaggtggagatatttatggtatggtccacgaaaacacccttgttaagcacaaaatgatcctcccaccaaaatctaagggaacagttacatacgtggcagaaccaggaaactatactgttgatgaagttgtattggaaactgagtttgatggagaaaggtctaaatacactatgttacaagtctggccagttcgacaggcaagacctgttagtgaaaaactcccagctaatcacccgcttctcacaggacagcgtgtattggactctcttttcccatgtgtgcaaggaggaaccactgctattcccggtgctttcggttgtggtaaaactgtaatttcccagtcactttccaagtattccaactctgatgtcattgtgtatgtaggttgtggagagagaggtaatgagatgtctgaagtattgagagatttccctgaactgactgtggaaattggtggtgagaccgaatctatcatgaaacgtaccgccttggttgcaaacacctccaacatgcctgtcgctgcccgtgaggcttctatttatactggtattaccctgtctgaatatttccgtgatatgggttacaacgtttccatgatggctgactctacatcacgttgggctgaagctttgagagaaatttcaggacgtttggctgaaatgcctgctgattctggttacccagcctacttgggtgctcgtcttgcctctttctatgaacgtgctggtcgcgtcaaatgtttgggtaaccctgacagagaaggatcggtttctatcgtaggagcagtatctccacccggtggtgacttctcagatcccgttacttcagcaactttaggtatcgtacaagtgttctggggtttggataaaaaacttgcccagcgtaaacatttcccatctattaactggctcatttcttattcgaaatacatgagggctctggacgatttttatgacaagaacttcccagaattcgtatcactcagaaccaaagtcaaggaaattctccaggaagaagaggacctctcagaaattgtgcaactggttggtaaagcctctttagccgaagcagacaaaatcacccttgaaatcgccaaactgttgaaagaagacttcctccaacaaaactcctactcctcctacgacagattctgcccgttctacaaaacggtaggcatgctcaagaacatgatcggactgtacgacatgtcgagacacgctgtagaaacgaccgcccaatctgaaaacaaaataacctggaacgtaatcagagactccatgagcaacatcctctatcagctcagcagtatgaagttcaaggaccccgtcaaagacggagaagccaaaattaaagcagacttcgaccagctctatgaagacatccaacaggccttcagaaacttggaggattaagtgggggtcgcgtaggactgtgcagcttggggttttaggtttcgaagatgtttctctggaactgcacttggtcactatcagaaggcctctgtccctcactctgggtattgtcaaccagcggaagtagtaataatggggttttcccttttgatattatcatgtataataataaatcatgtaaatttttcgagtatgtgtatagtttttgagatttcttggtgagggtaagtgttgaaaactataatttttcccatcattccagttacttttaagtttgattttttttttcattgaaataggtgcttatcagttgtccagtattatcgatttcattgaactgtggccattttcgaaatcatttacacattttaaagctgttgtacattatatttacctttttaaagatatatcttactattgtacagtttaccatgtatccaatgtctagaggtttagaacttttgattgtagtgctattgttctgttttgaacgataataaacatacatactgttgtt

SEQ ID NO: 305 - DNA, 1686 bp, Plutella xylostella
  source 1..1686: mol_type = genomic DNA
atggcagcagtagcagcagcccagaagaaccgcgagatgttcgccatcaagaagtcctacagcatcgagaacgggtacccgtctcgtcgccgttcgctggtggacgacgctcgcttcgagaccctggtagtcaagcagaccaagcaaagcgttttggaggaggcccgtgcccgcgccaatgactctggcttggattccgaacttatccaagacgatgtcctgattggcaccggcgctgtcactccaactgttgaggtgggcactcagcaggacgacactaaagatggtcaactcgccgatgcggaggtcggtggaatagacggaaatgcagatgacgattacaccttgaccgaggaggaggtgatcttgcagaactccgccagcgagtccccggaggccgagcaggcgctgcaacaagcggctttgcttctgcgcctgcgcgacggcatgggctcgctcgcgcgcatcctcaagaccatcgacaactacaagggctgcgttcaacacctcgagacccgcccctccaacgccaacgacatccagttcgatgctctcatcaaagtgagcatgtctcgcggcaacctgctccaactcatccgatctctccgccagtccaccgccttcgccggcgtcgacctcatctccgacaacgtctccagcaagaccccgtggttccctcgccacgcttccgacctcgacaactgcaaccacctgatgaccaagtacgagcccgagctcgacatgaaccaccccggcttcgcggacaaggagtaccgcgcgcgcaggaagaccatcgccgagatcgccttcggctacaagtacggcgacccgatcccgcatatcgtgtacacggagaccgagaacaacacgtggtcgcgcgtgttcaacacggtgctggacctgatgcccaagcacgcgtgccgcgagtacaaggcggcgttcagcaagctgcagggggacgacatcttcgtgcctcaccgcatcccgcagctggaggaagtgagcaacttcctgcgcaagcacacgggcttcacgctgcgcccggccgccggcctgctcacggcgcgcgacttcctcgcctcgctcgccttccgcgtgttccagtccacgcagtacgtgcgccacaacaactcgcccttccacacccccgagcctgactgcatccacgaactcctcggccacatccctctgttggccgacgccagcttcgcccagttctctcaggagatcggtctcgcttctttgggagcctctgacgctgaaatcgaaaaactgtctaccgtgtactggtttacggtggagtttggtctctgcaaggagaaccagcaactgaaggcttacggcgccgctctcctgtcttccatcggggagctccttcacgcgctgagtgacaagcccgagctgaggtccttcgagcccgcgtccacctccgtgcagccctaccaggaccaggagtaccagcccatttactacgtcgctgagagcttcgaagatgccaaagacaaattcagacgctgggtgtcaaccatgtctcggccgttcgaggtgcgcttcaacccgcacacagagcgtgtggaagtgctggactccgtggagcagctcgagaccctcatctcccagctcaacaccgagatgctccacctcaccaacgccgtcaagaagctcaagggctcccacttcgagtga

SEQ ID NO: 306 - DNA, 1044 bp, Diuraphis noxia
  source 1..1044: mol_type = genomic DNA
cagaagattgttcaaacacatatatcgtcgtttcgttctggataccgattattcacaacatgggaagttacaaattatacctggccgtcatagcaatagcttgcatagctgcagtacaggaagctagttgctctgatgagcaggtacagtacgatgatgrggaagaagtgatcggattagagaaagagcaggaagaagtgtccgaaccagatatggaggaaaaagaagagccagaatcagagatggagtaccatcagtgcgaggaatacaaatcgaagatttgggacaatgcatttagtaataaggatgctatggacatgatgaaactgacgtttataacagctgagaaaatgggctccgacgccgtgtgcactgacacagcccgggccttcataaacttcatcgaagtgatggccaccaacagtaactcccaatacacgagaagtatgttcaaaaagttggtggcgtttattgttagagagttgaacacgacgtcggacaatttcagagagacgtcggaggtgttcgaacgtatctggacaactccagagattcgtgactttatcagggactcagtcactcggaccaataacgtgctcaaggagccccgtatgagaagccgactgttcaaagtgattgaagcagctatggatctgatgtcgaaatccaaagacggagaatcaatgaaacagaagtttaaggggatgtacagagctcccaccaagatggcaaggagtgccatggataaggttggaaatttctttcgaaaactttaataagaatgtccatacagactagtgatatatatatatatatatatatatatagcatatacatatagataaacataaagtgcagattttctaaaaaaaaatgttaacctaaaatctcacttccccgcctctctgagagtcgtcttcagtgttttgtacagtatcattacacattcggtatatctaacataccacacaccgcgttgttcttgcaataaatattgttattgttattattttattttgttctaaataaactcaattgattaac

SEQ ID NO: 307 - DNA, 3085 bp, Acyrthosiphon pisum
  source 1..3085: mol_type = genomic DNA
tgaacctgcaataatcgccgccaccgacgcgacgtacagaccggtccgtgcagtgtcccttagttgtacttgtgcgctttttgtgtgtcggtcacgtgcggatttcgcacaaacgttttgattttttcacatcgtatatctgttattgtctccacgcaataattattgcactcgccgcagtgttgcatccattcagtagaaacaatattggcacctattttatagaggctcgcgccgttcgtatttatagttattataaatatagtgcccgaacgacttcgggctcgtccgactttcgtggattttatatcattaatttttttatcgtcgtcgaaatgctgttaatcttgaatagtgatccgttgtcgtatccgtcaccgatccatgtgtcgacgatttaaatctagaagaaattcgtccaccacggtgtccaagacctcacactcactatttaccagccggctcgacctacaaatgacttattgttgatcgatcatcagagaaaactcgcacgcttaaacaaaaaatgtttttggaaaacgaacaccagccaattattagccattcaccgtacgacctagcacgtccacttgaacaccatcaccatcatcacctcaaccatcacgccgcgtccaatcatcttcagtcgagcaccgaccacttgcaagaagattcggaaggccggagtacggctagctcgccgacgtccagttaccgcgacctgtccgggtgcgaagactttgatctgaaaatcccgaaaccgtctggtcacgggtctggcactggtggaaataacaacaacaataaccacaataacaacaacaacaaggaacaaaaaccgaaaaagcacaagtgcaaacactgtgggctggagtgcacagaaaaggtgcagtactggaagcacattcgcactcacataaaacctgaacagttgctggagtgcccaaactgtgagttcgccaccgacctgaaacaccactacgaataccacctgctgaaccacacgggtgccaagccgttcacgtgcccggactgcgactacaagtgcgtgagcaagtcgatgctccaatcacacctcaagtcgcattcgaacgtgttccagttccagtgttacgactgtggttacgcatctaagtacatgcacagcctcaagcagcacctgaagaagcgcgaccaccggccggccacgccgctcaacccagacggcacgccgaacccggacatcgtcatcgacgtggtgggcaaccgacgcgggccgcggcagaacaagaaacaaaaccggcacaacccgtatcagcaacagcaccagcagcaacagctccagcagtctatgacggtgtgttcgtcgcaggacgacggcggcagcagtagcggcggccacccatcaccgtactcgatgcaacagctgttgcagatgcctgcttccggatgcgcccaagttacgtatccgacctcggccgagtcgtttatgtattcgatgatcactaaacgctccatggagatggttgattaccaggccgccgaatacatggccatcaagaacaacaacaataataacaactcctcgtcggtcgatgataagatggaagtgcaacagcaccaccaacaatcactacaacaccaccacaacaatcatcaccataaacgcggccatcagtaccattcagatgacgtgctgaaagtggaattggctgggcgtagcggtagtggcggtgaactgacgcccgaaccacatgtacctgtgttggcggtcgccgatccttcgcccccgaccgtcgttttggccatcgagacgggaccgttgaacttaagcagagactcagtggctcctcgcgccgcgggcagcagccggcgtaaggggatcgcgtgcaaactcgagcgaccggcaaccgaatcgcagcctaagtcggtgtcggtgccggtggtggttgttccggtgtcgcctgcagtaccgatggattgcagtagcgagtcaagaggaatggtggaggagactttgattccggtaaaggaagaatatcaacagtaccaccactaccatcagcagcagcagcagcagcagcagacgtcgtcattgtcttcgacgcctgaaaaagaagacaaggaagacgagacgcatgtgtgccaccactgtgacataatattcaaggagaacatcatgtactcgatgcacatgggtttccacagcttcagggacccgttcgcgtgcaacctgtgtggcgagataacggcagataagttttcgtttttcgctcacatagcgcgcgtgccgcacagttaggctgcaattagaagacgcacctacgaaagatacgaaataataatagagtacaaattttaaaacaattaaccctttaggtatgtaatataggatttatcgtaagaaaaaattaaaacagattaagaatataaagtaatgttacataggtactatattatacatctctttctttttaataactgtcccccccaaacctaagagtgtagttacgccgcacccatgcttcgtacaaatgaaaatcgtttttggcgcttagctaaaaacgattttaatttgtatacctacgcggccggtgttgttgaacggttccggttcttaaacgttgatttcaacttatcaacgtgtaagagtcggcaccgtgtcttcaaatcgtgattgcgcacattaatcgtcgagatgcttagttgtttatcgttttaaatatttttttctcgttatatttttctcggaaataaaattttaattatgttttaattttattttcgaggaataaaagccatcgccaattttagcgatttaaaaatgtttaactcgtgtcctcatagttaagcacaaattattagtttatttgttacatgtaaattttattatccttaaaaataacttttttaactttccaattacccaagattgaatcaataatgacaaatattgattttttttacgtttaaataccgtaatacctcatcttcttcattattttttattgtttgatctagtcgttaaactatttctcctcgtatactatagtttagtatcgtgtatacctatgcacttatgatagatactattaaaaataaaaaa

SEQ ID NO: 308 - DNA, 2383 bp, Botrytis cinerea
  source 1..2383: mol_type = genomic DNA
atgtcctataatcgattagatccggcgggccaaggccaagacgattattacaatatgaataatagacatcaatcgccgcaccctcaagggtaccaactagaagatgcgccatatggcagaccaaatactacttcacccggtcctggaatgcacaatctagagatacctatgggtcctggggcacatagaattggaacgccgagtgatcaattgcaagctcaaccatcttattcggtcgaacatttagatcaaaatcaataccatcagcgcatgtccctcaatcccagtcaaagctacgactcggaatattctttagatcctaacgcgcatcacgatgcttactaccaacctccataccaaccctctcctcatgaagaacaccctctacagaactatgccccagggcaagacccctacgcttacaatgatgatgatgaccatcaaccaattctacaatcgcatgaaccttatgggccagatccgcactcagctagtggcactgattacaaaggtggttatgacgggacggtacaatctccatcagcgacacctgtacctgcgttgagaagatacaagacggtcaaggaagtccaactgttcaatggaaatctcgtactcgattgtccgattcctcccaagcttttaaatcaagtcaatcatgcaccaccgccggagagagatgagttcacacatatgagatattcagccgcaacatgcgaccccagtgagttttttgaggagcgctttacattgcgacaaaaactctttgcaaagcctcgacacacagaactcttcatcgttgtcacaatgtataatgaagatgatgtattgtttgctagaacaatgcacggagtattcaagaacattgaatttatgtgcactcgtaaagacagtaaaacatggggcaaggatgcttggaagaagatcgtagtgtgtgtggtcagtgatggacgtgctaaaatcaatccaagaacaagggctgttttggctggtttgggggtttatcaggacggaattgcgaagcaacaagtcaatggcaaggacgtgacagcacatatctatgaatatacgactcaagtcggaatttctttgaaaaaggatattgttacactcacaccaaaacagcaacccgttcaattgcttttctgtttgaaggaaaagaatcagaaaaagatcaactctcacagatggttcttccaagcctttggtagagtacttgatcccaacatttgtgtactcctcgatgctggtacaaaaccaggaaaggactcaatttatcatctatggaaagctttcgatttggaaccacattgtgcaggagcttgtggtgagatcaaagctatgttgggcccaggaggaaagaatttggtcaatccattggttgctacccagaatttcgagtacaagatgagtaatattctggacaaacctcttgaatcggcatttgggttcatttcggtgttgccaggtgctttttctgcatatcgatatgtcgctttacaaaacgataaaactggaaatggaccactggagaagtactttgcaggagagaaaatgcatggagcaaacgcgggtatttttactgccaacatgtaccttgccgaagatcgtattttgtgtttcgaactggtatcaaagagaaattgtcactggatcttacaatacgtcaagtctgctactggagaaaccgatgtaccagatacaatggcggaacttattttgcaacgtcgaagatggcttaacggaagtttcttcgctgctatctatgctcttgctcatttctatcaaattttccgaagtgatcacagctttttacgaaaaatcatgtttttgattgaattcacatatcaaactattaacatgatcttcgcttggttcgctcttggtaatttcttcttggtttttcacatcttgactacatctctcggaagttctgacttactgggtaacgttggtgtaattcttggtgttgttttcgaatggctttacttgtttacgcttttgacctgttttattctggcgctgggaaatcgacctcaaggaacgaacaaagtttatatgtctatggtttatttctggatcattatcatgatatacctaatgtttgcttcgattttcatcacagttaaatcaatccaaactcaacttgctaaagacgaattcaactggacggatattatcaagaatcagatcttctatactctgatcatttctctcgcctcaacttatctactctggttcatttcttcctttttattcttcgacccatggcacatgtttacatctttccttcaataccttcttctcactccacatatatcaatattctcaacgtttacgcttttctgtaacactcacgatattacatggggcacgaagggaa

SEQ ID NO: 309 - DNA, 2736 bp, Botrytis cinerea
  source 1..2736: mol_type = genomic DNA
atggcgtactctggaaacggaggctatgatgagcataagctccaagaccttccacctggagggggcaactaccatcaccctcaagatgaagaggaaggagctttacctttactcgattctggaggacatggcggcccattcaacagcccttacgactctcactcccaaggaggccttcgagcgaatactcctccagtcagacctgtttctgcctacagtcttacagaaacgtatgcgaacgatccacaaccatacagcagcgattacaactcatcccacacatacaatgagcagttagaagataacccatacccacaaaccgacactcctttgtcaagagccgggactacctccacagaggcatggagacaacgacaagcccctcaggctggaggtctcaaacgttatgctacaagaaaggttaagcttgtccagggaagcgtcttgagtgtcgatcatccagtacccagtgctatcaaaaatgcaattcagcaaaaatacagaaatgatttggagggtggcagcgaggaattcacacatatgcgttacaccgctgcaacttgcgatcccgatgaatttactctgaaaaatggttacaatctacgacctgccatgtacaatcgtcatactgagttgctcattgccgttacctattacaacgaagacaagcagttgactgcacgtactcttcacggtgtcatgcaaaacatccgtgatattgtcaacctcaagaaatctgatttctggaatgtcggcggaccagcatggcaaaaaattgttgtctgccttgtttttgatggtatcgatccttgcgacaaagacacactcgatgttcttgctacaattggtatctaccaagatggtgtcatgaagaaagatgttgatggaaaggagactgttgctcacgttttcgagtacacaacacaactttcggttactgccagtcaacaacttatccgcccaaccgagggtgatgccaactgtcttcctccggtgcaaatgatgttttgcttgaaggcaaagaacacaaagaagattaattcccatagatggctgttcaatgcatttggtcgtctccttaaccccgaagtttgcatccttttggatgccggtacgaagccaggacctaaatcgttgttgtctttgtgggaaggtttctacaacgacaaagatctaggaggtgcttgtggagagattcacgctatgttaggaaagggaggcaaaaagcttctgaacccgcttgttgcaggtcaaaacttcgagtataagatcagtaacattcttgacaagcctctagagagttctttcggatatgtcagtgtgttgccgggagctttctctgcataccgattccgagctattatgggacggcctcttgaacaatacttccacggagatcacactttgtccaagattcttggaaagaagggtatcgagggaatgaacattttcaagaagaacatgttcttggccgaggacagaattctctgtttcgagcttgtagccaaggctggtagcaagtggcatttgacttatatcaaggcagctaaaggagaaactgatgtacctgaaggagctgctgaattcattggtcaacgtagaagatggcttaacggttcctttgcagcaggaatgtattccatcatgcatttcggcagaatgtacaagagtggtcacaatattgtccgcatgttcttcttgcacattcaattcttatacaacgtcttctccaactttctcagttggttcatgttatcttctttctggctcactactactgttattatggatcttgtcggtacccctactgctgcttcggacactactgcccttcaccatggctggcctttcggtgatactgctacccccatcatcaacacgattctgaaatatctctacttgggattcctactcgttcaattcattctggctcttggtaatcggcctaagggatccaaggctacttatattgtctcctttgtcgtttttggtgttatcaatctctacgtccttgttctatccatgtatctggtcgttcgtgctttctcgtcaggagatagtctcgatactagtagtgcgaaagatttctttgagagtttcttcggagatagttcgagttccggagctggtatcattattcttgctttagctgctacatttggattgtacttcgttgcatccttcatgtatatggatccatggcacatgttccattctttcggaccgtacttgttgctcatgtcatcttacatcaacattctcatggtgtacgctttcagtaattggcacgatgtttcttggggtaccaagggatctgataaagcagaagctcttccgtcagctaaaactacgaaggttgatggtaaagcagcagtcattgaagaaatcgacagaccgcaagaggatattgatagtcagtttgaggcaactgtcaagcgtgctcttagtccatttgttcctgaagttgaagatgagagtaagaccttggaagattcttacaaatctttcagaaccaagcttttgatctcttgggtattctcaaacgcgttgttggctgttgctatcactagtgacagtgttgatggatttggtttcggaaatactgcatcaataagaactgctaagtttttcgaaattttgctttactcaacggctttcttggcacttattcgattcctcggatgttcttacttcttgttcaagtctggtatcatgtgctgcttcatgagacgttaa

SEQ ID NO: 310 - DNA, 2715 bp, Botrytis cinerea
  source 1..2715: mol_type = genomic DNA
atggaaacatcaaggagctggaatagttcggctgaaaactatcctatgaatgaacttattcaacattcaaacaattctgttactgatcctgctacacagttagataacactgatcatattagtgatgtacatcactcaaatgatgctcatgatgttggtgaaagtttgctatcagatactagtggctaccatccaacaacaccctatgtgactggtactgggcaggtacaacgtcaacgttcaccaaccagctcagtgaacggtgaggaatttttcggggatcaacaccatcttccagatatcgaccaggacttctacagaagccccgaagactcctttaatgcgcaagacatgccgtccgcgaacggtgctcgtggagctcttcggcgccgcgctactcgaaagattaaactgattcaaggcggtcagggatctgtcttgagcgcaaactaccctgtaccaagtgcaatcaagaatgcattacagccccagtacagagatatagagaatggtaccagcgagttctcagagatgcgatacaccgcggtaacttgcgacccgaatgattttaccttgatgaacggttatacactacgccagcacatatacaaccggcacaccgagcttttgattgcaatcacctactataatgaggacaaggtgctattcgctagaaccttgcatggtgtgatgaagaacattcgcgatattgtgaatctgaagaagtccaggttttggacgcagggttccgcagcatgggagaaaattgtcgtctgcctagtgttcgacggtttcgaaaaggcggatccaggtgtgctcgatctcctcacaaccgttggagtatatcaagacggcgtgcgaaaacaggatgtggatggaaaggagacgacagcccatgtcttcgagttcacgacacagttatccatcactcccgacctacagctttctcgtcccaattcggatgtggatgattccagtaacttgcctccagtacagctcctcttctgtctcaaacaaaagaataccaaaaaaatcaactcgcatcgttggttgttcaatgcctttggacggattctcaacccggaagtcaccattttgatcgacgcgggaacaaaacctggacctcgctctttattggccttatgggaggcattctataacgacaagaaccttggtggcgcatgtggtgagatccacgctatgcttgggagccggaactccaagttactaaatccgcttgtggcaatacagaatttcgaatacaagatttcgaatgttcttgacaaaccccttgagagctccttcggctacgtcactgttctccccggcgcattttcagcatatcgctttcgagcgatcatgggccgtcccttggagcaatattctcacggcgaccatacgttgttgtctggcaagaaaagtatcaacaacatgaatatttttaaggagaatatgttccttgcagaagatcgtatcctttgtttcgagctagtagtgaaagaaggacagaattggcacttgtcttatgtcaaagctgccaagggcgagacagacgtaccggaaggccctgctgagtttctcagccaacgccgccgttggctgaatggatcatttgcggcctcgctatactcgcttattcacttcggtcgcatgtacaaatccgggcacagtctgctccggatgataatgtttcatttccagctgctatacaacattgccaatgttatttttagttggttctctttatcatcctattggctcactaccactgtcatcatggatcttgtcggtacacctgtaactgcatcgaactatcacggctggccgtttggcgatactgcgtcccccatattcaaccacgttattgaatatatttaccttgcgtttgtgatcacacaattcattctggcccttggaaatcggccaaagggatcgcaagtgacctatctggtgttgttcgtggtgtttggatttattcagctctacatcatcattctgtcattctatctggtttaccgggcactacggactcccattggggaacagatcgacacgtcttcggccgcagcattctttgagagcatgtttggaggaacgggagtcgccggcgtgattttactagccttggtcaccatttacggcttgaactatgttgcctcgttcctctacttggatccttggcatatgtttcactccttcccgcagtatatcattctcgcttcgacatatattaacattttgatggtgtatgccttcaataactggcatgatgtttcttggggcacaaagggctcagatgaaagcgaaaagctcccttcggccaatgtgatcaaagactcgaaatccggtgtcgagatggtcgaagaagaggagatgcaacaaacagatattgaccagaagtttcaggagaccgtgctaagaactctggcccctgtcgaagtggaagttaccgtagaaaccaaggaggtcgatgacacgtataagtcgtttaggacccgcttggttgtctgctggatcctgtcgaatatgctgctggtcgggattgtcacctcggatgatttcgcatttcttggcgttggtcctctacgacccggaccgccatactacttcaaatttcttctatatgccactgctttcttgtcgattatcagattcttagggtttctttggtttctcggacgaacaaacattatgtactgctttgcgaagaggtaa

SEQ ID NO: 311 - DNA, 4648 bp, Botrytis cinerea
  source 1..4648: mol_type = genomic DNA
aaaccttccttccgagccaggatatcgagctttcgacgtcttctactacctcctcacatctgcatcgactcctgccgaacgagaattcttgagcttaaagcaagcttctagttacgcgcttctagaaaagtctggaacatatggccctccaccgtaccttcctactgcggatgatgctgctgctgcagacgacttcagagcatcattaaaagctattggtatcaagggtgccgcacacagagatctcatctcaatattagcaggattactaaagctaggtgataccttgagctttgttcttgatggggatgcgttggaggaaatttgtgaggatgttggaggtctgcttggtttggaacccgatgttctcgtcaagcaatgcacaacccaagagcgagaaactttgatcggtggtctctatgaagcccttgtagattgggtaattctgaaggccaacgaagccattgctagtgagatgctcaggatcaaggacggtgattcttccagtgaagggggaccaggagctcgaaccccaaatacagaagacgacaatggtgatactgtctgcataactgttcttgagattccagacccaaatcctgggaaagcggctgcagtgcgaggtgtctttgacgatactcagggtattaattccgaaatgaaagaagatggtgtggatgtagtttctgctggctcaacggttatccgagagatgcaaaatgctgtatccgaagttgctccagatctcggtatcatgactggaccttctgggagagatcgtgaacacgagcttgagaagcgtgagatcgtattagagaaggttgcccgcgagggagaagatgatggtttcctcaagaagcttctgctcccaatcgagggtcaaggtattaacctaggccgcaacggtcgtattgacctaccttccgttcttggtagcagtcgcgtctggtatcacttatctatgcatccgaccgacgattcacccgcagctctcgcttcgcttccttcaacaacttcggcttggtccgcgggtgctatctcacgccaactccgcgcctggcgtttgccagagtgggcaaatcgacgaaacaaaaacttggattttacagccgatttcgatttcgaagaatttgttcaacgatatgccccccttggttgtaaggatggccgtgatggcattgaaagctgggtcatggagcgtggttggagcaatggtgaagttgtcataggcaaagagcgaatatggatccgcgaaagtgcttggtgggaagctgaaaccatgcttgacctaaagccggccgaaggggagttccaaagtatgggcggtcctggaggcatggcaggcatgctaggagcccacgacatgaacacaggatactcctccaacccaccaaatggaagtggtttctttgccggtcccaataatgatctgacgcctcttgggagtcacgataatatgatgaatcgacaaagtcaagtcaacgtggcccggagtaacctcggggctcccaccatcgcaccatcaagaaatatcagtggtggtgactatggactcggcttcaagggagataatacgaggggccaggtttattacactgatgagaatggagaaatggtggatgatcccgaaggtggcaccccgaaagctgtcgtcagcgaggcagcaacaaaccagcgtcgtatctgggccgccattacctgggctttcacgtggtggattccttcattcctcctctcatttattggtcggatgaaacgaccggatgtacgcatggcttggagagaaaagctagtgttgtgtttctttatcctcttcatcaatgccttggttattttctggattattgaatttggtaaactcctctgtccaaattccgataaagcgtggaatgcaaaagaagtcgctactcatcaaggagataacgatttttgggtcagcattcatggaaaagtatacgatctttccaagttttggaagttgcagcacagtgataccactgtcgagacaacctctgatgttatgcaaccatttgctggtttgaacttggacagttacttcccgccaccattgactgttgcatgccctggccttgtaaccgattacaccgtggttttactggacaatagtactgttgaatatccttccggggtccatacatctggcaacctttcagcatatacaaccagtaaactttacgactggaattggtatgcggacgtgtacacacctgcaatcaaagagtattaccatggtgatctagtggtcaagaatagtgcgatcaagagtgaaggccaaaatgaaaatcattattgggttatatcacgagtgatggatgacaattacaaaacagccaacgcatcttatcaagtggatatcctcaacaacttgaattgcatgaacaatttgttctatgcaggcatccctgattttcgagattctattagatgtcagatcaacaactacatccttctcgctttcacaattattgtgtgtgctgtcattgtcgtcaagttcgtgtctgcacttcaatttggttcgaagcgtcgtccaactcctcaagacaagttcgtcatttgccaagttccagcatacaccgaaggtgaagactcattgcgtaaagctttggactctgttaccgctctacaatacgacaataaaaggaagctcatctgtgtcgtttgtgatggcatggttgtaggaggtggtaatgatcgccctacaccaaagattatcctcgatattctcggtgtagatcccaagatcgaccctccagccttaccgtttaaatccgtcggagatggcaacgagcaactcaactatggtaaggtatactcaggtctatacgaatttgaaggaaatgtggtaccatatattgtagtggtcaaggttggcaaggaatccgagcaatccaaatcgaagcccggtaatcgtggaaaacgtgacactcaaattattctcatgagtttcctcaatcgcgtccatcacagagcacccatgaacccattggagttggaaatgttccatcaaatcaacaacattattggcgtagatccagaactttacgaatatctactgatgattgatgccgataccagtgtaagggaagactcgctgaatcgtctcgttgctgcctgtgtcaatgacggtaaaatcgctggtatttgtggcgaaaccaatcttgaaaacgaagagcaatcttggtggactatgattcaagtttacgaatatttcatctcgcatcatttggccaaggcctttgaatctctattcgggagtgtcacttgtttacctggttgttccactatgtatcgtctacgtaccgctgacaaaggcaaaccattgattatcgctgatgccatcattgacgagtacagtgagtgtgttgttgatactttacacaagaagaatcttctgtctcttggagaggatcgattcttgactacgttgatgaccaagcacttcccatacatgaagtacaagtttattccagatgcatacgctagtactgccgcacccgaaacctggagtgttcttctttctcagagaagacgttggatcaattccaccattcacaatctagctgagttggtccgacttcctgaactgtgtggattctgttgtttcagtatgagattcgtcgtcttcatcgatctgttcggtacaattattcttcctgcaactacagtctatctaggatatctgatctacaaagtcgcaacgcatcaaggtcaattccctctcatttcgatttgtatgattgctggtacatacggtttacaagctttgatatttattctcaaacgtcaatggcaacacattggatggatgattatttatatccttgcattcccaatttactctttcattttgccaatctactcattctggaatcaggataacttctcgtggggtaacacacgtattgtcctgggagaaaagggagctgcaaaggttgtggccgtggacggcgctgaatttgacccaagaagcattcctcttcagcgatgggacgattacgcctcacacaacaaccttccaggacgtcgtggagtaccagtcgaaaaggcatacgatacattcgatgatcaatacgaaatggatgacatgaaatccatgtactcatctgtcaagccagcctccactattttaactggtttccctggtcgcggtccatacatgcctcctcaatctacttactccgcaaaccaatacactgaccaccctgtccgcaatcattctgcaatgtcccttcgccaacaagatcgttccgcctcaccatatcaagactaccctggcaacaatcgtccttcgatgcaaatgatgtcttcggataatcttctcggtggtggtccaggacgacatcaatcacgctcgtcggtaggcttcacaggtggtgctcgttcaccattagcaggagctggtattgatagacctgctagtggatttgatttccaaaggggtaccgccggtccagatgatttgcagattgtagaggctattcaaaactgcttgagggaggtagatctagataatgttacgaagaaacaggttagagctttggtagagcagaggttgcagacagagttggttggtgagaggaggacatttttggacaggagtattgattctgagttggctgctatgtaa

SEQ ID NO: 312 - DNA, 259 bp, Botrytis cinerea
  source 1..259: mol_type = genomic DNA
catttcggaggcggtcgaaactcgccggtttcatgcgtgcctctcacttcttcagtgaagctcgaaggaaccacgcttgaccaagttaatatgttcaccctatgtctatttcaggatgtgttcagcaaagcttacaaatcgaatcctgatagtatgccgtactttttggttcctatcaattgtccaaatcacactggggactggaaagattatgagcccatgtcaataattgattgggaaactgttcaatatgtccaag

SEQ ID NO: 313 - DNA, 200 bp, Botrytis fragariae
  source 1..200: mol_type = genomic DNA
gcatggcaagaggcagaacataatcctggaattgttcgtacatctattatgagcctcgatgatttaaagattgagctctgccttccgatcgagccaccaccaattccgcccttgacacttcactggaattccagcacagagctgtctgtcgagtttacaaacgatgccgaaataggaaccaccgaggacatgatattacg

SEQ ID NO: 314 - DNA, 210 bp, Botrytis cinerea
  source 1..210: mol_type = genomic DNA
agaagcagattgttattttggccatctcaccatcatcgcagatggatatgcctccaaattccgcaagcaatacatcaacaaaactcccattgtcaaaagtaaattctacgctctagaattaatagattgtcccatgccagctcccaatcatggaatcgtagtcctctcggacgtctccccagttctcctctatcaaatcggtacccacga

SEQ ID NO: 315 - DNA, 254 bp, Botrytis cinerea
  source 1..254: mol_type = genomic DNA
gcgaagttgatggagcaaaagaagttcatgaaaattggcttgtctacagaagctttccgatcctacgtcccaatcatacaaatggaggtggaaaactttatgaagcgttcttcggcgttcaaaggtccaaagggaactgctgacattggtcccgctatggctgaaatcaccatctacactgcttcgcacactctgcaaggaaaggaagtccgcgatcgattcgatacctcctttgcctctctctaccacgacct

SEQ ID NO: 316 - DNA, 209 bp, Botrytis cinerea
  source 1..209: mol_type = genomic DNA
ttcaacgctgtcaactgggtagaatcatctgcatgggatggaagagacgccattgtcgttgctggagatattgctctatatgccaagggtgctgcacgtccaactggaggtgctggagctgttgccatgttgattggaccaaatgctccagttgttgtcgagcctggtcttcgcggatcctacatgcaacatgcctacgatttctacaa

SEQ ID NO: 317 - DNA, 186 bp, Botrytis cinerea
  source 1..186: mol_type = genomic DNA
gtctggctaagcctagtcaattgaatgcgttcattcgttatagttcacagcagactgaaagtcatgatacgttaacagagacaactcgaaatattggcatcatagctcatatcgatgcaggcaaaactacaactactgagcgtatgctctattacagtggctatactcgacgcataggagacgttg

SEQ ID NO: 318 - DNA, 1610 bp, Fusarium oxysporum
  source 1..1610: mol_type = genomic DNA
atgggttttaatccgcaaggccaaggcaacggcccaaactatgatgcgccacgggaaatgcaagatttaccagctggccaagcttaccactttcgcgaatctgacgaaacagccgccgctcgtgtttctcctgtgagcaatccttacgaaccagactatgatcaattgtcccctccccctccgctgggcgcacaacgacccgtgcccgagcagaatgagtcgagccgcgatcttctacacagttcataccaaggcagcgtaggccataacagctttgacggccatagttttggtcacaatagctatggacctggtgcttttgggcattatcctgctgaccagcacggtcgcatgcctgggtctccgggctacgaatacccagagcctgagtacgatgtcgaagcttcgcgtttggcagaatctcgtctctccgtcatgcatcgcgcccctacgatgcaagattggggtcagaatggcgaggctctgtctgttccagactttgcccacggacgccccgactcaacgtaccaggagttcgatgtcgacgagagctggatgatgcgacagcagcagaaccaactcgcaggtggtctcggtcgctcaaagacccgtaaagtcaagctcgttcagggctccgttctcagcatcgattaccccgtgcccagcgccatcaaaaacgccgttgaaccgcgataccgaagcggtcccggaagcatggaggaggagttcacaaagatgcgctacacagctgctacatgcgaccccaacgatttcaccctgcgaaacggctttaacctccgccccaagatgtacaaccgtcatacagaactgctcatcgccatcacctattacaacgaggacaaggtgctacttgcgcgtaccctccacggaacgatgcagaacattcgggacattgtgaacctcaaacgctccaagttctggaacaagggcggtcctgcgtggcagaagatcgtcgtttgtctcgtctttgatggtatcgacaaggtcgacaagaacgttttcgacgtgctcgcgacggttggtatctatcaagatggtgttctcaaaaaggatgtcaatggcaaagaaaccgtcgcccatattttcgagtacaccagccaagtctccgtgacacccgatcaacagctcgtccgtcccgatcccgacaagcctcatcgcaatctcccccccgtccagtttatcttctgtctcaagcagaagaacagcaagaagatcaattcgcatcgctggctcttcaatgcctttggccgcattcttaacccggaggtcgccatcctcattgatgccggaacgaagccggccccccgcgccctgctgtccctctgggagggcttctacaacgatcgtgatctcggcggcgcctgtggagagatccatgtcatgcttggcaagggtggaaagatgcttctcaatccactcgtcgcggtgcagaatttcgagtataagatctccaacgtcctcgataaaccgctcgaaagtgcctttggatatgttagtgttttgcctggtgctttctcggcgtatcgcttccgcgctatcatgggtagacctctggagcagtactttcacggcgaccatacgctctccaa

SEQ ID NO: 319 - DNA, 4677 bp, Fusarium graminearum
  source 1..4677: mol_type = genomic DNA
atggcgagacgaatgtccatgtattcgatggcctccgaggctatgggcggtcctcaagctccccagcagatgtctaccacgactctcctgaatgccatccacaacatctacctgtcttctcaaccttatcagatcgatgccggtactagtctggttgtcaacacatggctcacagctgctcaggctggtgctactgttgatgctaccctcgctgctcgagcctgggagcatgctaggcgtcgtgctgaagatggatgtgttgttttaggttcactccaccaggcaactccctcgcttctcgtgccgttcctgaacactttcccgttcgccattcccgcatccatttacaagtcattggaggctgtacaaccgtttctccgatgtgtcactccatacaacgcttcggcccctcgacagatcgcactcggcgttacactgacattgagtttgggaggaagtgtcacaggagcctctctggccttgtctcaaggtggaatcgatactgagaatggattgctcaacgttcctgccgaggctggataccgtgcttttgacgttttctactatttgctcacatccgcctcgacacccgcggagcgagagtttctaggcctcaaggcgccttcagcgtatgctctccttgctcgctcgggtacttacgagcctccttcttacctcatcaccgccgatgatggtgccgctgccgacgactttcgccaggcactcaaggagattggtatcaagggatctgtccaccgtaacttcatctctaccttggctggacttctcaagcttggcaacactctcgactacgatgccgattccgacgatttcgaggagatctgcgaagatgtcagcggtcttcttggtatggagcccgaggttctcatgcaacagttgagcactgaggatcgacgaacacttgttgctggcttgtatgaggctctcgttgactgggtcatttccaaggccaacgctgccattgccgctcagatgctccgtatccgagatggcgatgagtctgttgatggtcgtggcgtccgcactccaaacgaaaacgaggatggtgacaccgtttccatcactgttgttgaagtccccgaacccgctctcggcagggctttggccatgcgaaccattttcgacgacactttgggcattaacgctgagatgattgaggatggtgtcgagatccaccctgcttcatcttctgttgttcgggagatgcagcaggccgttgccgatgtcgcgcccgatctgggcattatgactggtccccagggccgagaccgccagcatgatattgagaagcgagaagtcattttagagaaggctgcctacgcttctgaggaagacagcttcctgaagaagttgttgttccctgttgagggtcaaggcatcaacttgggccgaactggtcgtttcgatctaccaggtctcctgagctctagccgtgcctggtttcatctcgctctgcatcccacagacgattctcctgctaacttggctacccttcctgctatcacctctgcgtggtcagctggtaccatttcccgacagctccgttcttggcgtcttcctgaatgggccaaccgtcgtaacagaagtctcgactacacagctgattttgatgtagacgagttcgttggtcgttacggcgcactaggctgtaaggatggcaaggacggtatcgagacttggatgctcgagagaggctggagcaacggcgaagtctttattggcaaggagcgaatctgggtccgcgagggtccttggtgggaggcagagagcatgctcgacatcaagcctgctcacagtcttcaaagcataggtcaaaatccgttcacatccggttttgacacaagctactcagccaacccacccaatggcagcggcttcttccctgctcccgctatggacaacagcatgaatggcagcaatgaccagctcatgcatacccgtaatttcagccagggcaacatgagccaagccactttcaaccaacaccctcacttgaaccctcaatcagcaccttcgattgccccatctgctatgcgcaatgctcagcccgctaccggtgactacggtctcggtaacaagggcgacacctacaagggacaggtattctataacgatgatggagacttcactggtaagcttgatggagaccttgccaaggacaagaagatcgaaaccaagcccctgacctttggccgacgagcttgggttgcttttgtttgggccttgactttctggattccttcacctcttctcaagtttgttggacgcatgcgacgacctgatgtccgtatggcttggcgtgaaaagctcgtcttgttcttcattatcctccttcttaacggcttgattatcttttggattatcggtttcggaaagcttttgtgtcccaacgccaacaaggcatggaacgttaaggaggttgctggccatgcagaagatgaggatgctttctgggttgctatttttggcaaggtttacgatatcaccgacttctggcgacaacagcacagtgataccagcattaagaccaccaagacgaacatgttgcccctcgctggtatggttatggataactacttcatgcctcccctgaacagagcttgcagaggcctcggcatcaaggagactgttcaactcaccttcaacgagactataacgaaccctcttgcacagcatgtttctggtttctacactcgcgaccgtaccagtgctcttcacaacgctgactggttctggacgactttccagcccaagatcaaggaatactaccatggtgatctcgtttggaaagaaggcaccgttaagagccagggctcaggtagcgagcagcatccatgggtcatgtacggtaatcagatctacgatcttacggattatctgcacaccctagatgtcaacgacaacttcgatacctacaagttcttgaacgaggacatggtcaacttatggaagaacagccccggtaccaacatcaagaaggatcttgaccttctcatttccaacgcaaagaatgagactgtggccgccaaccttaagaacagttggcagtgcattcaaaacattgcgtacaagggtatcgtcgatttccgtgactcaccccgctgccgtgtcaacaactggctccttttggccttcgccattatcatctgtatcgtcaccgctgtcaagttccttgctgctctacagtttggttccaagcgacgtccttcgccccaggataagtttgtcatctgccaggtgcccgtctacactgagggtgaagattctcttcgaaaggcattggactcgttgacggctcttcagtacgacaacaagcgcaaacttatctgtgtcatctgtgatggtgtcgtcgtcggtgaaggcaacgatcgtcctacacccaagattgttctcgacattctcggtgttgatcccaaggttgatcctcctgcgcttcccttcaagtctgttggcaacagtgccgagcagctcaactacggtaaagtttactctggtctgtacgagtttgagggcaacgttgttccatatatcgttgtcgtcaaggttggcaaggagtctgaacagaccaagtctaagcctggtaaccgtggaaaacgtgactctcagattctccttatgagcttcctgaaccgtgtccatcatcgcgctcccatgtctcctctcgagcttgagatgttccatcaggtcaacaacattattggtgtggaccccgaattgtacgagtaccttcttatgattgatgccgatacctgcgttgaggaagacgccttgaaccgtcttgttgccgcctgtgcccacgacgcaaagattgctggtatttgtggtgaaaccgccctggagaacgatgaaaagacttggtggacaatgatccaagtttacgagtacttcatttctcatcatcttgccaaggcctttgagtctctcttcggcagtctaactcgtcccagtttcaccatgtaccgtcttcgaagtgttgacaagggcaagcccctgattatctctgatggtgtcattaaggattacagtgtttgcgacgtcgacaccctccacaagaagaaccttctgtctcttggtgaggatcgttatctcaccaccctgatgaccaagtacttccccgagatgtcctacaagtttatccctgatgctcagtgtaagactgctgcccctgaatcttggagtgttttgttgtctcaacgtcgacgatggatcaactcgaccatccacaacctggttgaacttatgcaactcaaggagctctgtggtttctgctgtttcagtatgcgcttcgttgtgtttattgatcttaccggtaccatcattctcccttcaaccaccgtctacattggttacctcatctacgtcttggctaccggcactggacccattccgtacatttctcttgctatgattggtgccgtttacggtcatcaggctctcatctttattctcaagagacagtggcaacacatcggatggatgattatctacatccttgctttccctatctactccttcattcttcccctctactccttctggaaccaggacaacttctcgtggggtaacactcgtatcgtcattggagagaagggtgacaagcaggtcgttgctgttgacgatgagggcttcgatcctcagtttgctggcgaaaggtag

SEQ ID NO: 320 - DNA, 6546 bp, Fusarium graminearum
  source 1..6546: mol_type = genomic DNA
gaactcaaaccaccaaaaaccaaccctcgcctctcccctttgctactctttgcattacgcattgccgacactcgttttacggcttcgtcaaatcactccgtctcgcccttttttgcgaccgagactacacaagccggtgaatcactttctcgtgattgattcgtctttttgaacttgaatcgacgccaaattacatctttttcgttggcctttcggaccagagtcacctctccctaagccatttgacgtttttgacgacaacatcttgcagtgccggtcacgcttgttcttccgcctgatcttgaatcacatcacgctcgttgatcatccacatgtgtatctctagataatctaataactcaacatgtcgggatatccgggcggtggtcaacgcgaccactatgacgatggctacggccaccctcagggaggcaaccaacagcaaggtggaaacacggattcctactatcaagacgatcaatactatgatcaaggctatgacaaccgcggccacaataataataacccgaataacaacagcaacaacaacaacgagggctactatgacgaatctggttattacaacgccgaccctaacaacccttatcaacatgacggaggctactacgacggccacgaccagtatcaagatggctattatgacaatggccagggtggatactacgaccaggactatgatcgtgggcaccaaggacagggtgcccgtcaaggctctgaggaagattccgaaacgttcagcgacttcaccatgaggtcggacatggctcgcgctgccgagatggattactacggccgcggggatgaacgttacaacagctacaatgacgggcagcgtggttatcgacctccctcctcccaaatctcttacggtgggaatcgctcgtctggcgcatcaaccccgaactatggtatggactatggcaatgctctacctcctggccagcgttcccgggaaccttatcctgcctggacttccgatgcacagattccgttgtcgaaggaggagatcgaggacatctttcttgacctttgttccaaatttggtttccagcgagacagcatgcggaacgtgtacgaccatctgatgatccttctcgactcccgagcctctcgaatgacgcccaaccaggctcttttatcccttcacgctgactacattggcggcgataacgctaattaccgcaagtggtacttcgccgctcatcttgaccttgacgatgccgtcggatttgccaacggtcttggaaagggtaggaagaagaagggtagcaagaagaagaagaaagacccagaggccagtgaagccgagactttacaggatctcgaaggtgacgaaagcctcgaggctgctgagtatcgttggaagacacgcatgaacaagatgtcccagcatgatcgaatccgacaaattgctctgtaccttctctgctggggcgaagccaaccaggttcgcttcatgccagagtgcttgtgttttatcttcaagtgtgccgatgattatctcaattcccctgcatgccaggctctcgttgagccggttgaggagttcaccttccttaacaatgtcatcacccctctctaccaatacttgagagatcaaggttacgaaatctctgatggtgtatacgttcgacgtgagcgtgaccacaagaacatcattggctatgacgattgtaaccagcttttttggtaccctgagggaatcgatcgcatcgtcctgcacgacaagagcaagcttgtggatgtgccaccagccgagagatatgtgaagctcaaggacgtgaactggaagaagtgcttcttcaagacttaccgcgagtcccgttcctggttccatcttctggttaattttaaccgcatctggatcattcatttgaccatgttctggttctacacctctcacaatgccccaagtatcctggttggtccaaaatacgaacagcagcttaaccaacagccctcaacagccaagtcattctctatcgtagggttcggtggtgctattgcttctcttattcaggttcttgccactctcgccgaatgggcctatgtgcctcgtcgatgggccggtgcccagcatcttaccaagaagctctttttcctgttgtttatcctggtactcaacatcgctcctggtattaaggtcttctttcttgagggtattggtggaaagaagatcgacactgccattggtatcgtccatttcgttatcgcattgattacgttcttattcttttccgttatgccacttggaggcctttttggcagttaccttgctaccaacaacaggaagtatgttgccagccaaaccttcactgctagctggcccacgctccgtggtaacgatatggcaatgtcctatggactctgggctgtcgtctttggcgtcaagatgggtgtttcatacatctacttgattctgtccttccgtgaccccattagatatctaagcatcatgaaggtcaactcttgccagggagacgctcttctttttggaaatcagctatgcagatggcatccaacaattgttctggcactgatggcattcactgacgttatcttcttcttcctggatacatacctttggtacgtccttctcaacaccgtcttctcggttgcccgatcattctacatcggatcttccatcttgacaccttggagaaacgtcttttcccgtcttcccaagcgtgtgtactccaagatcctcgccaccaccgacatggagatcaaatacaaacccaaggttctcatttctcaagtttggaacgccatcgtcatctccatgtatcgggagcatctcctcgctatcgagcatgtccagaagctattgtaccaccaggttccttccgagcaggagggcaagcgaactctgagggccccgaccttcttcatctcgcaggaagatcattctttcaagaccgaatatttccctgcttacagtgaagccgagcgtcgaatctcattctttgcccaatctctgtccacacctatcccggagcctttgcctgtcgacaacatgcccacgttcactgtcatgattcctcactacggcgagaagattcttctgtctcttcgtgaaatcattcgagaagatgaaccatactcacgagttacacttttggaatacctgaagcagcttcatcctcatgagtgggattgctttgtcaaggataccaagattctggcagatgagacctctcaattcaatggagaaaacgacaaggacgagaagaacactgccaagagtaagatcgatgatttgcctttctactgcatcggttttaagtcttctgcgcccgagtacaccctgcgcacccgtatctgggcatctcttcgtttccagactctctatcgtactatctctggcttcatgaactacagccgtgccatcaagcttctgtaccgcgttgaaaaccccgaggttgtccaaatgtttggtggtaatactgataagcttgagcgagagcttgagcgtatggcccgtcgtaaattcaagattgtggtttccatgcagagattctccaagttcaagaaggaagagatggaaaacgccgaattcttgcttcgcgcttatcccgacctacagattgcttatcttgacgaagagcccccagttgcggagggcgaagaacctcgtctgtactccgttctcatcgatggtcactctgaggtcatggagaacggcatgcgacgtcccaagttccgtgttcagctctctggtaaccccattctcggtgacggcaagtctgacaaccagaaccactctatcatcttctaccgtggtgaatacattcagctcatcgatgccaaccaagacaactatctagaggagtgtctcaagatccgaagtgtcctcgctgagttcgaggagatgaagaccgacaatgtctccccttatacccctggtgtcaagaacaatgtctcctcgcctgtcgctattctgggtgcccgtgagtacattttctccgagaacattggtattctaggtgatattgctgctggaaaggaacagacattcggtacactattcgctcgaactatggcacagattggtggcaagcttcattatggtcatcccgatttcctcaacggtatctttatgacgactcgaggtggtgtttcaaaggctcagaagggtcttcacttgaacgaagatatttacgctggtatgaccgctctcctccgtggaggacgtatcaagcaatgtgaatacttccaatgtggaaagggtcgtgatttgggtttcggctccgttctcaactttacaaccaagattggtactggtatgggtgaacaatttctgtctcgcgagtactattaccttggcactcagcttcctctggatcgcttcttgtccttctactacgcccatcctggtttccacttgaacaacatgtttatcatgttctcggtacagatgttcatgattaccatggtcaacctgggagccctccgtcatgagactgtggcctgcgagtacaaccgaaacgttcccatcaccgatcctctctaccccagcgggtgtgccaacactgatgcgcttacggattggatttaccgatgtatcgtgtcgattcttttcgttctgttcctctctttcattccccttattgtccaggaactttctgaacgtggcatttggcgtgctttcattcgattgatgaaacagttttgctcgttgtcgctcatgttcgaagtcttcgtctgtcagatctacgcgaactctgtacagcagaacatttcgttcggtggtgcgcgatatattggtacaggtcgtggtttcgccacggcgcgcattccctttggtgtcttatactctcgattcgctggaccagctatttacttcggcgctcgtttgctcttgatgcttctgttcgcgaccctcactgtctggaagggtgtcttgatttacttctggattacccttcttgcgctgacaatttcgcccttcctgtacaatccccatcaattcgcttggaccgactttttcatcgattaccgagattaccttcgttggttgtcgcgtggtaattcccgcagccacgcttcatcttggatctcgtactgtcgtctttctcgaactcgtcttacaggttacaaacgcaagacacttggagacccgtctgccaaagcatcagctgatgtccctcgagcccctttcgcaaacatctttttcagtgagattttctcgccattgatgcttgctgttgtaacgattctgccgtatctttttgtcaacgctcaaaccggtgttactaagcagagcaatccaaacttcagaggcaagatccaaccgacgcaatcgctaatgcgtctactcatcatcgcttttgcgcctgttgccgtcaatgcaggtgtcttggctgctatgttcggcatggcttgctgtatgggacctctcctcagtatgtgttgcaagaagtttggcagtgttctcgcagctattgcccatgccacagctgtgatcttccttcttatttccttcctgggcatgttcattctggagagctttaacttcacccgcactgtagcgggtatgatcgccgtggtctcgattcagcgcttctttgtgaagcttattgtttcgacctgtctcactcgtgagttcaagggcgacgcgtctaacatcgccttctggagcggaaagtggtactcgatgggatggcacacaatctctcagcctgctcgtgagttcctttgcaagatcaccgaactttccatgttctctgccgatttcgttcttggccactggcttctcttctttatggcgcccgtcatcttggtccccaagattgatactcttcactctatgatgctgttttggcttcgtcccagtcgccaaattcgaccccctatatactcgatgaaacagtccaagcttagaagaagacgtgtcatccgctatgccatcctctacttcaccctcctggtcgtattcatcgctctcgttgctggacctgctgtagttggtaaactcatgggcgaatcactcagcaagaccatcgaaaagatggttcctatgcagggtcttgtgcagcccaactatcttcacaacaacaacactaacagcaccttggcaactggtatcaagaaccctagttacaccggcgctggtctcacaatgactggcagcaagcgcgtccaggcctcggctactggcaagatcaagctgttttgagcgaaaaaagactgggagacagggtctgtctttttggacatttctcggacacagtcgtcgctctctgttcctatgcacagaagaaagttatcaaaatatgaagtttttgctttttcgtttttgcttttgcttttcagttcagtacctagcacaggtggatgcgtatgtacacattttgcattttatttagaagcggaagggtggtgagaggtggaaaggaggtcagcaacacaagccagacctgacctgacctggcattcactggttgaactgaagtggtctttttttgttggcacaaggcgcacctttttaacttattctaatgtgtacaatgaaaggaagcaaca

SEQ ID NO: 321 - DNA, 3504 bp, Fusarium graminearum
  source 1..3504: mol_type = genomic DNA
atgaacgacgatgacgcgattcacaacatccacaagaagatagagcgggaaaaggccctcatcaacgctgccaattctatgagggcacagacaaacaatgaagccgttagatcccgtctcgactcccagatgcgcgatggccgccgcaacctccagtttttcgaggagaagcttagggatattcagctgcgccgtgtgaaccaaggtgttggagacatgtctctcgggggacctgctgacgatgccggtggccctcccgcaccacctcctaaggatgcctccagcaatcccgcgggagatagaggttcctacggctctggttcgggacagtacagccaggctggcggtggttccgacttaatgccccctcgtcatccttatgcaccgggacctggtggatcgggtattcctaaggcacgccccaactttaccaagttagacttaatcaaatatgatacgccacacctgggccctcgtattcaactcatgttgtcccagatccagttcaagctcaatgtcgaggagcagtacctgaagggtattgagaagatggttcagctttatagcatggaaggtgatcggaagagcaaagccgacgcagccgctaggaaggttgaaagcaagcagaagattctactgttgaagcaggcactcaagagatatgaagaactgcatatcgacgcggacgttgcggatgcacaagatggtaagttggcgttgaatgacgtcgaatgtgaagctgacaaagagttagatgattcaatcaacgcccccaacctcaggaagcccctcagtggacaactctcgattcgaatgatagcaatcaaagatgttgaccatgctgcgactggacggttcacgagaggtcccgagacctttattgccgtgaaggttgaggataccgtcatggctcgtacgaaagcgtccaggaacgatcgatgggaggctgagttccatactatcgaagtcgacaaggccaacgaaatcgagttgactgtctacgacaaacctggcgaacaccccatgcccataggcatgctctgggttcgcatttccgacattgttgaggaaattcgtcgcaagaggattgaggccgaaatgaacagctctggctgggtgtctgccgacagaatgggcagcaccagtgctgcccctacacagttcccgatgagtccttcttcaggctcttttggaccaggtgctcaatcgactggtggtgaccaaggggatgatactggcccattcggagctgctggtccccagcctcaggtgcaaactggacctatcgaggaatggttcaatctcgagccaactggacagatccaacttcagttgacatttaacaagtccaacaacaacagccgccctgccgaccttggtcttggtcgaaagggtgccgttcgtcaacgaaaggaagaagtccacgagatgtacggacacaagttcgtgcagcatcagttttacaatatcatgcgctgtgcgctttgcggagatttccttaagtactcagcaggcatgcagtgtgaggattgcaagtatacctgtcatacgaagtgttattctagcgtcgttacaaagtgcatcagtaagagtaacgctgagactgatcccgacgaggaaaagatcaaccaccgcattccgcacagattcaacccttattccaacatgacagcaaactggtgttgtcactgtggttacatcttgccttttggaaagaagaactgcagaaagtgctcagaatgtggtcttactgcccacgcccagtgtgttcatcttgtccccgatttctgcggcatgtcaatggccgtcgccaaccagattctggacggcataaggactcagaagcaaagacaagccaaggtttcttcactttcagaaaagacacttcgacatggcaagactagcccgacaagcaccagctcgccggctccctcatactccagcacgactgctccttcttaccagtcaggaccagtctccccggaggctacagaggccgctaagatgatgtactcgaacccttccacgccgagacctgccggccctgatcgaacttcatccagctcccaagctgcggctgcagcatctgcggctatgtctggaggacctggtgcggcccaacggcagaactcagactttgggcgatatagcggcggttacgatcaaccgcaagaagacccctatgctcaaggaggtcaatacggcgcgggccagcagcgtaagtacaacccggccgattatgcgaacgtgaaccctggctacggaggaccacagcctgctgctcaggctcagcgacctgtacagcagcagccagcccaacaacctcctcctcagtcaccgctacctccagtaccgcaacaccaacaacagcagccacaggctgcctaccaacagcccgcagtgccggcgcatagccctcagcaaccagaacccatgtctcctaagcagcagtcagcggctggtggtaagtctgctcccttggctactgaccctggaactggccagcgtatcggacttgatcatttcaacttcctggctgtgttgggcaagggtaacttcggtaaagttatgttggccgaaaccaagcgctctcgaaagctctatgccatcaaggttctcaagaaggagttcatcatcgagaatgatgaagtcgagagtatccgttctgagaagcgtgtgttcttggttgccaaccggggcagacacccattcttgaccaacttgcatgcatgcttccaaacagagacccgtgtgtacttcgtcatggagtacgttagtggtggtgatctgatgttgcacattcagcgaggtcagttcggtactaagcgtgcgcaattctacgccgccgaggtctgcctggcgctcaagtacttccacgagaacggtgttatttaccgtgatttgaagcttgacaacattcttctctcacttgatggtcatgtcaagattggtgattacggtttgtgtaaggaggatatgtggtatggctccacaacaggtaccttttgtggtactcccgaattcatggccccggagattctcctggacaagaagtacggccgtgctgtcgattggtgggcatttggtgtgctgatttaccaaatgcttctgcagcagtctcctttccgtggagaggatgaggacgagatttatgacgctattctcgccgatgagcccctgtaccccattcacatgcctcgagactcagtctcaatcctccagaaattgctcactcgtgagcctgaccagcgactcggaagcggcccgactgatgcccaggaggtgatgagccagccattcttccgaaacatcaactgggatgagatgtaccacaagagagtgccgccgcctttcatgccgcagatcaagagtgcgacagataccagcaacttcgactccgagttcacaagcgttactcccgttttgactccagttcaatccgttttgtcacaggccatgcaagaggagttccgaggcttctcatacacagctgattttgactaa

SEQ ID NO: 322 - DNA, 5592 bp, Fusarium oxysporum
  source 1..5592: mol_type = genomic DNA
atggctatgagcctcccacagctcggcggcgcaggaggccctcacactcaaccctctttgccatcgttgccagcacatcttcaatccgatacgcatctcactgctcatctcgccagtcgcttccatgtctcgcatcctaccgctcgactgtcttctcacgctctcatctctctcaacacctataccaactcctcaaagggtcccgatggcggcaaggaggggagcgccatggctggcgccgaggaaatcgctgacagagcttttctgcgattaggacacagatccgagaaccaagccgttgtgtttttgggtgaatctggcgctggaaagtctactattcgagcccacctcctgactgctcttctcaacaaatcatcgacgcctctgtccacaaagctctctctcgccgcatatgtctttgatagtctcacaactaccaagactgccacaacacccactgcttccaagtccggtctcttctacgagttgcagtacgatacttcagccacaacaaaccctgttctgattggtggtaagctcttggatcatcgtctggagcgtagccgtatcgccgatgttcccacaggagagcgtaacttccacgttctttactatcttcttgccggaacaagcgaggctgaaaaatctcatctcggcttggacggtggttctgccactggaaccactcaaaagcgatggaagtatcttggccatcctactcagctcaaggttggaatcaacgatgcagagggtttccaagttttcaagaatgctctgcgaaagctcgagtttcctcgcgccgaaattgccgagatatgccaaatcctcgccagtattcttcacattggtcaactagagtttgagacaactagccagaccagcgtcactggcgatgatagtggtggtttctctcacgagggtggtacaaccattactgctgtcaagaacaaggatgttctcagcatcatcgctgctttccttggtgtcagcgccgctgacctccagaccactttgggctacaagaccaagatgatccaccgagaacgtgttactgttatgctcgaccctaacggtgctcgtgctcacgccggagagcttgcccgaacactttactctcttcttgtggcttggattcttgagaccattaaccagcgactttgtgctcccgaggagtccattgccaacactgtctcgatcgtcgatttccccggtttctgccagcaaactcccactggctctgcgctcgatcaacttctcaacaatgctgctaccgagtgcatttacaaccttactctccagaacttcttcgaccgcaaggctgatatgctggagtctgaggaagtcagcgttgctgcgaccagctatttcgataactcggacgctgttcgaggcatcttgaagcccggcaacggtcttcttagcattctcgatgaccaaactcgacgaaaccgaacagatatgcaattccttgaggctcttcgaagacgtttcgatggcaaaaacgctgctatcgaggtcggctctgcccaagctaagcttcctggaagcaacttcatgactgagaacacatctgctgtcttcaccgtcaagcactttgctggtgaggttgattaccccgtcaagggtctcatcgaagagaacggcgagatcatctctggcgatctcctcaacatgattaacggcactaagagcgagtttgttgcccgccttttcggtcaagatgctctccagactgtcactcaccccaatgaacgcactaccgttatgcaggctaccgtcagctcaaagcctatgcgagcgcctagtgtcatgtctcgaaagacgcatcgaactggtcgtcctagcacagcttacaagcgccagcagcaagaggccatggaggagttagatcagcagagccaggctggagagtctaagaagaacgccaagatgactctcgagcaaggtgcttcaggccagttccttgcctccctggacaatgtccagaaggctgtcactgaccctggcaccaactcatacttcgtcttttgcttgaagcccaacgatcgacgaattgcgaaccagttcgacagcaagtgcgttcgtatgcaggtccaaactttcggtattgcagaaatcagccagcgtcttcgatctgctgatttcagtttgttcttgcctttcggcgagtttctgggtatgacagacccggagacaatcttggtcggcagtgaacgagagcgtgctgagatggtcattgaagagaagcagtggccccagaatgaagtcagagtcggtgccactggtgtcttccttagcgaacgctgctggatggagattgcccagcttggcgaggcagtgtcagtttctggtcgctacggcggcttgccttcatcagatgctggtgatggtctcacacctgctgagtctatggctttcggtgcctccaaggaacatttggtttctggtggcaacacccctctcatgtacggtgagaaggccaagggtggttacttcactgatgacactcgatccgaggctggtgtttctgcctttggtggcggtgacatgttcaagaacctcgacacacgcgagcagatggctgagcgaggcaatgagaagtctctcgaggaggttgaggagtatagagataagcctagccgcaagcgttgggtggctctcgtcttcttcctcacttggttcatccccgattttgccatcagactgatcggacgtatgcctcgaaaggatgtccgtatggcctggagagaaaaggtggcgatcaacatgctcatttggttgatgtgtgctgtcgccgccttcttcatggtcggattccctatgctcatttgccccaagcagtatgtctacagctccaacgaactctcttcctacgacggtgacaagggcagcaagggcgcctacgttgctatccgcggtttcgttattgacctcaatgccttcattcccaaccattatcctggcagcaacctcgtcagcgaggatactctcttgaactatgccaggcaaggatatcatgcgctcttttccccatccaagtgtctgcctctgtgccagggcaaagatggtcagatccctcctgaggttactctcgacaaccgaaacaccaacatcactggtcagccccagcttcttgcctccagagatattgatgtcaactctgtctaccacgatttccgttatttcaccaatgacagccgacctgattggtacttcgagcagatgtacaccttcaagcatgtctacctcaagggacgaatgggttacagccctaagtatgtcaagaagctggcccgagatagctcttggaacgttgtcactatccacgggaaggtttacgacatgaccaagtacctccagggtggtctccgtttgaaggccaaggctggcaagcctactcccaacatcccaggtgccacagacttcatggaggacagcgttgtccagctattccgaagtgcaaagggccaagacgtttccaagtactgggataacatcaagcttagccctgtcaaaaaacaacgcatggagacctgcctgaacaacctcttctacattggtgactcagatactcgaaactccacccgctgtcagttcgctacatacttcatcttggctatttcagtcatgctcgcatctatcctggtcttcaagttccttgctgcgctccaattcggtggcaagaacgtgcctgagaacctcgacaagttcgtcatgtgtatgattcccgcttataccgaagatgaagactcgttgcgtcgtgctatcgactcgctttctcgcatgaagtatgatgataagcgtaagcttctcgtcgttgtctgtgacggtatgattatcggtcagggtaacgacaggcctacgcctcgcatcgtgctggatattcttggtgtcccagagactgtcgatcccgagcctctcagctttgagtctctcggtgagggtatgaagcagcacaacatgggtaagatctactcgggtctttacgaagtccaaggccacatcgttcccttcatggtcattgtcaaggttggcaagccttctgaggtctctcgccccggtaaccgtggtaagcgagactcccagatggttctcatgcgtttcctcaaccgcgtccactacaaccttgccatgagtcccatggagcttgagatgtatcaccagatccgcaacattattggtgtcaacccaaccttctacgaatatctcttccaaattgatgccgatactgtcgtcgctgcggactcagctactcgaatgatttcagccttcatcgatgatactcgcctgattgcttgctgtggtgaaaccgctctcaccaacgccaagggctctttcatcactatgattcaggtctacgagtactggatttcacacaacttgtccaaggccttcgagagtttgttcggctcagtcacttgtttgcctggttgtttctctatgtaccgaattcgcgctgcggagactggtaagcctttgttcgtcagcaaggagatcgttgaagactactccacgattcgtgttgatactctgcacatgaagaacctgctccatcttggtgaggatcgatatctcacaaccttgctcctcaagtaccactccaagtacaagacgaagtacctcttcagcgcacaggcctggactattgcccctgactcttggtctgtcttcctgtctcagcgacgtcgctggatcaactctactgtgcacaatttggctgagcttattcccttggcccagctttgcggtttctgctgtttcagtatgcgttttgtcgtcttcatcgatcttctgagcactatcgtccagcctgtcattgtcatgtatattgtctacctgatttaccaggtcgctaccaacccttcagttgtgcccattacagctttcctgctgctcggtgccatctacggtctgcaggctgtcatcttcatcctccgacgcaagtgggagatggttggttggatgatcatgtacatcgctgccattcctgtcttctctttcggtctgcccctgtactccttctggcacatggatgacttcaactggggtaacactcgtgttattgctggtgaagccggtaagaagatcgctgtttcagatgagggcaagtttgatcccaactcgatccctcgcaagaagtgggaggagtaccaagccgagctctgggagacacagacccagacagcccgtgacgatgtgcgatcagagatctctggttacagttatgccaccaaggctcaaggacccttctctgagtacggtggtggttaccagcccagccgccccggctcaacagctggcttcggccaccagaacatgtctcgcatgtctctggcccattctgagatgcctggcaaccgtgcgagccagtttggtggctcacagttcttctctcccgaggacctggttggcatgcctagtgatgacgccctcctcgctgagattcgtgacatcctcaagacagctgacttgatgactgtcaccaagaagggcatcaagcaagagctggagaggcgattcaatgttcccctagacgcgaagagggcctacatcaactctgcaactgaagccctgctttctggccaattgtag

SEQ ID NO: 323 - DNA, 1992 bp, Fusarium oxysporum
  source 1..1992: mol_type = genomic DNA
atggatctatcacagcgggcgcttccgcgtcacactcatcaccaaccaccaccatctctctcaaatccttcgccctcacatctgccgcctcaacattctacgtctacgtatagtcctggtcccgttgcctcgcatccaactctccctcttcccggaactcacccaccatcctcggctttgacaccaggatcggcctcaacatcccctgcatccatctcccaccggttaccttcagcatcagcttcgacgacatcaaggcatcctactggcgattatctccctgacgcagatgatcaagacgcgtcgacacccgtggatggagaggaacctccaaagaagaagcaaaagcgcaacaagccaactctttcatgccatgaatgtgtagagcgcaagaccaagtgcgacagaggtcgaccccattgtcttgcctgcataaaacgacagactgaatgccgatatgcccatgtcgcaaaccttctcgaggagaccaccaggtcagccgccaatggccgccgtatgacgaaacccccaaagaagaagtctggctctagtggaaagtcccccattccaaatatcgcagataggggtatgtcgaatgatcccagggcaacctcgcgtggcgctgttgccctctctatcggccttctgtccaacgttccttattccttgccttctgcaagtaacgtttttggtatcgggtccgagcacccatttgccaactactggacctgcgaagggggcttgcctgaggttatctcggtgcttccagacaagattcaagccgatatactacttagccgatacttcgaatgtgttgaccccgtgtatcccatgatacatcgccagacattctatgcggactacgaacacttctggcagatgaatcagcaagaaaagaccgatacagatccgtccttcattgcattaatctttgtcatgctggccctgggaactcagtttgtaacatcgactacatccccacaggagcgaaggcagacagcagagttctatgcttcggctagcaaccaagctctccgtatcgcatcatatcttagcagtgcatcgttacggtcaatccaggctatggtattgctagtgtacttccttataaacgacaaccatgcctcagatgggtgggcgtttgcaggtattctgattcggcaagcttatgctatgggtcttcatagagatccaaatattgtgactccaaatgccaccctgtttgagaagcagcagcggcgtaaggtctggcaagcggtacttctccaagatactttcttgaccgtcttactctccctgccaccgtctgcgacacatacagatgtttccgtggaagacctactcgacgatggctcctcgattgcaaatagcgacccaacagatacggcatatattcgaggctcttggactttggccaacttggttcaggagacgatctgctcaccaagatcgttagacctaccaatctgcactacggcaaggcataagtctaagttgattgctgacttccgagctgtttaccgttcgttccctgacgtcttccggtcttgggatcctgatagtatcacggcgctcgcgaaaaccaataagagggtggttcgtcagaccctgttcctgacgagcaactacttccataacttgatgcttgttcatgcttccgagagccctgatgttcctgtcaatgttcgtggtacactggaggcagcgcacgacgccattacagctttcttccttcttttcacccttcttgagatagaagcacgtgtttggtgggtgttcaaccaccgagctttcttggaggcgctgtgtatcggaaatgtcctgaaggaggctgctcgagaaccaggtggtgcagatatgatggcaagagatcctctccttgtcagggcaaaagctgatatcacacgcatgatccaaatcatgcaggttatgggcgaagactctgaggtagcgaggactcgagtgcaggttttgagtgactttctggcatga

SEQ ID NO: 324 - DNA, 1581 bp, Fusarium oxysporum
  source 1..1581: mol_type = genomic DNA
atggctcatcatcaagcgcggacgatggctatggatccgccacatatcaccgaatttgcttctgagcgttacttcgaaaagttaagccagctcaatgcacaccaacatcagcgtcaacctcctccgactcgagataatcttgatgcttccacctcgtcgccttcgagatttattcttcctctacgagaaacgaaaactgccgatgttgaacctctaaggccccttgaccagaagcgtgataaatcaaggtttttcggccttcgctcaaaggtctcgatcctccactctaaatcgagtgtcgcgtctggtcatgcgcctcgagtttctgttgagacgccgcaaaaaagtgctagcttcgatcagcttttcctaggacttcccaacgaattacagattcaaatcatttctgccctcccactaaccgacgtcctgaacctccgacttgcctccaaatcgtggcatactctcgtcactttcaacgaaaatactatcgctcgatatcatctcgaacatcatattcccgtttacgcctcccgcctctaccccatcacagacccgagcgagatcaacttccaacatctatgcgggatatggcatcgattacacgtcgctgccaagctcgcctttctaatgtgtgaatggattacaaaagatatctttcttcgccaaactgaagctcaacgacttgcatttgcaccccagaacgagcgcatgcggcgacgcctaatacctcttctatttaccatattccacttcttcgagacgtaccgaaaattgtacctaaagcgtatggctgagaacggaggaaaaggattgagacgggaaccttatactttgaacccgattgaagccgaaatcatgagtatgtacgacgaccaaaccttattaagggttcacgaagtttttccccttgtaatatcatcgttctgtcggagactccgaccaccgacatatgttggtagagtcgagcgatcacttcgtggctatattcgggagaaaccgtccgacgacatgcatgttgccattttgtgcattggtggactgcgacaagtggaaaggctttgggaaatcaagggatacaacagcaggcgtggtgctgttgacacatggtttaatgctctcacgaaagaggcgccacctactgaacagtcaacgtcgaaaccgaaacgaggtcttttcggacgcaaaaagtccactagtgaagctcgatcgtctggtactgcattgaacaaggtccggagttctggctcaatagatgggaacatggattgggaagccaatcttgtcttcaacacgagtttatctgctggggctcccatgtcacctcttacttcgcaacaggctcaggcattactcagcgaccttcccgtactgcaacaaatatggctcacaacagctgaggccctgatccttcagcgtcgggttgtcgagcgtccacaggatatcaaacgcaaccaacaggtcatgctggatttgatcagtgaagatggacttgtagaagaggacgaatggtggtacggccgcagcattcccgattctgtgcggcctcccgtcggtgtcactgatgacgatgcggattaa

SEQ ID NO: 325 - DNA, 723 bp, Fusarium oxysporum
  source 1..723: mol_type = genomic DNA
atggcgtggacgtgcagcggagacactaactcggctcttattgggaacatgtggaagaatggtctcattgccgaccctcgagtgaaagaggcattcctcaaggttgaccgagctcactacgctccagccatgccatatgaagactcaccccagcccatcggctactcagcaactatatctgcaccgcatatgcacgcctcagccatcgagcatgttctcagctaccttcttccctcatcgacatcgccggccccccgggtcctcgatatcggttctggatctgggtatctaacccacgttatggctgaacttgtcggtgagaagggccttgtagtcggtcttgagcatattcgtcagctgaaagaacttggtgaaaagaacatgtcgaaaagtgaggagggaagaagattgcttgagagtggcaaggtgagatttaggtttggtgatgggaggaaggggtgggttgaggaaccgagagagggagagaagaatgaggggacgggctgggatgttattcatgtcggggcttctgcagtggagattcatccagagctattggagcaattgaaggcacctgggtgcatgttcatccccgtcgacgatgacaagatggggtacaaccagcacgtttggagaattgagaaggatggaaatggggagattacgaagaagaagttgtttggagtccgctacgtgccgttgactgaggcaccgaaggcgtag

SEQ ID NO: 326 - DNA, 2790 bp, Magnaporthe oryzae
  source 1..2790: mol_type = genomic DNA
atggcgtatagaggtgctggagggccgggaggcggccgtgactacgatggtcacaacatgcaagacctaaaccctcacagccagtattccaatgtccaattgcctcctgggcacgagcaagaggacgaggcacacaggtcccttttgacccaaggcacaacgctctacgaccacgaccgactcggcgcccacacgcctccagtgcgtccagtctcggcctacagtctcacagagtcctatgccccgaatgctcccaccaccgttcctggctcggccgtcggcgcatctccctcgccatttcagaatgactatggtgtttcgtcgggctaccagggcgcaatgggcggccacgcagacgacggcttccccattggcggcggagacccccagcaaggccacccctacgataccgaggacagctgggtgcagcgccagaaccccaacgccgctccccagggtggtggtctgaaacgttatgccaccaggaaggtcaagctggtgcagggttcagtcctgagcattgactacaacgttcccagtgccatcaggaacgccgtgcagcccaagtaccgcgagcaggagggcaccaacgaggagtttatcaagatgcgatacaccgcggccacctgtgaccccaacgacttcaccctgaagaacggttacgatttgcgtccccgcatgtataacaggcacacggagcttctgatcgccatcacctactacaacgaggacaaggtactgctgtcccgtaccctgcacggtgttatgcagaacattagggacatcgtgaacctgaagaagtcgactttctggaacaaaggcggcccggcttggcagaagattgttgtctgcttggttttcgacggtatcgagaagaccgacaagaacgttctggacgtcctcgccaccattggtatctaccaagatggcgtcgtcaagaaggacgttcacggccaggagactgttgctcatattttcgagtacaccactcagctgtccgtcaccccgagccagcagctcatccgaccccaggacgacggccccaacactctgccgcctgtccagttcatcttctgtctcaaggccaagaatagcaagaagatcaactctcaccgttggcttttcaacgcctttggacggatcctgaaccccgaggtctgtattctgctggatgccggtaccaagcccagctcgaggtcgcttctcggtctctgggagggtttttacaacgacaaggatcttggaggtgcttgcggtgaaattcatgctatgcttggaaagggcggccggaagctgctcaaccccctcgtagctgtgcagaacttcgagtacaagatctccaacattctcgacaagcctctggagagtgcgttcggatacgttagtgtgttgcccggtgctttctccgcataccgcttccgtgccatcatgggacgacccttggagcaatacttccacggtgaccacaccctgtccaagattctgggcaagaagggtatcgagggcatgaacattttcaagaagaacatgttcttggccgaagatcgtattctttgtttcgagcttgttgccaaggccggccagaaatggcacctgagctacatcaaagctgccaagggagagaccgatgttcctgagggtgctgccgagttcatcagccagcgtcgtcgttggttgaacggttcgtttgccgccaccttgtactcactgatgcacttcggaaggatgtacaagagtggtcataacatcatccgcatgttcttcttccacgtccagctcatctacaacatcctcaacgtcatcttcacctggttctctctggcatcttactggcttaccaccaccgtcatcatggatctcgtcggaaacccccaagttggacagaacgctcgcgaaggctggccttttggtaacaccgtcacgccactcttcaacgccgttctcaagtacatttacctggcctttgtcatcctacagtttattctggccttgggtaatagaccgaagggatccaagtacacctacgtcacgtcattctttgtcttctcggtcatccaggcgtatatcctggttttgtctggatacctcgtcgtccaggccttccagacacctatcggcgagcagatcaagaccgacacggccaaggatttcatggatagtatatttggaaagagcggagccgctggtgttattctactcgccttgatcgccatctacggtatttacttcatcgcctcgttcatgtacctggacccctggcacatgttccactccttcccttactacatgctgctcatgtccacctacatcaacattctcatggtgtacgccttcaacaactggcacgatgtttcttggggtaccaaaggatccgacagtaatgaagctctaccctcggccaatattaccaaaggcgagaaggacgaagtcgtcgtggaggaaatcgacaagcctcaagaggatatcgacagtcagttcgaagcaactgtccgtcgtgccctggcacctttcaacgacgaggagaagcccgagcccaaggatctcgaggactcgtacaagtctttccgtacaatgctggttgttctctggctcttctccaactgtctcttggctgttgcgattactagcgataatttcgacgctttgacaaagaaccaaaacacggccaggactgcctctttcttccagttcttgctgttctcgaccgctttcctctctttgatccgtttcatcggattcctctggttcttgggcaagaccggtataatgtgctgcattgcccgtcgctaa

SEQ ID NO: 327 - DNA, 5619 bp, Magnaporthe oryzae
  source 1..5619: mol_type = genomic DNA
atggcacaacaccttccgcctgtcggcggcaacggtggtgcacacacgcagccttcgctacccgcgctgcccgcccatcttcagtccgacacgcacctcacggggcatcttgccagccgattccacgtcagtctgccaaccgccaaactatcttcccacgccttcatctcgatcaacacatacacttcctcgagcaagggacaagatggaggcaaggccggaagcgctcaaggcgaagctgaggatatggccgacagggctttccttcgtctgggccaccgttccgagaaccaagcaattctgttcctaggtgaatctggctcgggaaagacgaccattcgatcgcacatcctgactgcccttctgaacaagacctccacgcccctttctacaaaggtctcactcgccgcatatgtcttcgacaccctaaccactactaagactgcgaccactccgactgcctccaaggcgggtctcttctacgaactccagtacgacacagcatcaacaacgagcccgctgctcatcggtggaaagctgctggatcatcgtctggagagaagtaggattaccgacgtgccaactggcgagcgaaacttccatatcctgtattacattttggccggcacaagtgccgctgaaaaaacccacctgggctttggagagcccgatgctggaaccggaagcaagcgatggaggtatcttgggcacccgacccaactgaaggtcggcatcaacgacgctcaggggttccagctcttcaagactgccctccgcaagcttgaattccctaggagtgaaattgcagagatatgccaagtcctggctagcattcttcacatcggacagctcgagtttgagagctcggaaaacacgacagttgccggcgatgagagcggtggcttctcgcatgagggtggccagatcacaaccgtggcaaagaacaaggacgtgcttgctatagtggccgcatttttgggtgtcagtgccgctgagcttcaaacaacccttggatacaagaccaagatcattcacaaggaaagggtcactgtgatgcttgaccctgctggtgcacgcgccaatgcaaatgaactagcccggactctttactccctccttgtggcctatgtcatcgagaacattaaccaaaagatctgcgctcccgaggaggccattgttaacacagtgtccatcattgacttcccgggattctcgcagcaaagctctactggctcatccctcgatttgctcctcaacaatgctgctgccgaggctatgtacaacttgaccttgcaaaactttttcgatcgcaaggctgatctcctagagaccgaggaagtcagcgtcccacccaccagctactttgacaactccgacgcagtcaagggactgctcaagaccggcaatggtctcttgagcattcttgacgaccaaaccaggcgtcaccgcaccgacatgcagctcctggaaagtctgcgcaagcgcttcgagggcaagaaccctgccatcggcgtcagtgcagccaccgcaaagctaccgggcagcaacttcttgtccgagaatactgctgcttccttcaccgttcgccacttcgctggtgaggttgaatattcgatcaaggggctcgtcgaggagaatggcgaagtcatctctggtgacctcttgaacctggtcaactctaccaagagtgactttattgctcgtctcttcggtcaagaggccctgcacactgttacccatccgcaggagagaaccacggtgatgcaagcttcagtcagttccaagcctatgcgtgccccaagtgtcatgtcgcgcaagatccgaccgggaacggctcgtactactcgccaacgcaaggagtcaatcagtgggcgacaggacaccctagacgatattgccagcgaagccggagattcccggcgccccgtcaacaagccatccgaggaaggcgcttctggtcagttcttacactcgcttgacaacgtgaccaagtctttccatgcacagaacacaaacgcctattttgtcttctgcttgaagccgaatgacaggcgcattgcgaaccagttcgacagcaagtgtgttcgcacacagatgcaaacatttggcattgccgagattagccaacgtatcagatctgcagacttcagtgtgttcttgccctttggagaattcctgggtcttgctgatgttgacactctcctcgtcggaagtgaacgggagaaggtcgaggctgttgttgatgagaagcgctggccgaccaatgagatccaaattggttccacaggtgttttcatcagtgaacgatgctggatggagatcgctcagctcagtgatatggtaaccggccgattcggcgtgcccgaatcggagggcggcacgccactcgccaacatgccctatggcgcttccaaggagcgcctcatagcggctgggaattcgccatacaacaatgacaaggccaagtcgggctactttggcagcaatgacatcgatggcaggtcagacgctggagtttcggcttttggcggaggcgacatgttcaagaatctggatacccgtgagcagatggctgagcgtggtaatgaaaagtccatggttgaggtggaggagttcaaagacagcccgagccgcaagcgctgggttttcattacctggatgctcacatttttcgttcccgagttcctgatacagcatctcggtaaaatgccccgcaaggatgtgcgtatggcatggagagagaagttggccatcaacttcatcatctggttcagttgcttggccgccgctttcatcctggtcgtgttccctatgcttgtttgccctacgcaatatgtgtttaccggcgaagagctctcggcctacaacggaaaagatggcaaggcttcgtatgcagccatccgtggtcaggtctttgatatcggatcgttcatccctaggcaccccctgccctatctgccatcaaagctcttcacccagtacgctggcactgatatcaccggtcttttccctgttcaggtgtctgctctgtgccaaggcacgactggctctgtcaaccctgccgtgctactggattacaaagacaccaacatcaccgactcgcccaacgtttttaacagccaggatctgaattcgcgctatcacgactttcgttacttcaccaacgatacaagacccgactggttctctcagatgatgattacgttccggggcacgtataagaagggcaacatcggctacccggctcaagttgtccagaagatggcccaacaaaggaacgccatcgcaatactcaatggtcgggtgtacgatttcaccaagtacatcgctggaggccgcgatttcagggtcaagtataacgaaacgcgtcctaccgaccagagtctactcgactttatggacccgtcagtcgtgaggcttttctcggaccgtagcggagaggacgtcacgccgctctgggatgcacttaggctggacccgactttacgaaagtcgatgcaactctgtctggataacctgttttaccttggcgatgtcgatacgcgtaactcggtgcgttgcaactttgccaaatacttcatcctggctgttacgatcatcctttgctccatcatcgccttcaagttcttggctgcgcttcagttcggtaccaagaacatgcccgagaacctggacaagttcatcatgtgccagattcctgcctacaccgaagacgaagagtcgctccgtcgcgccattgactctgcagcccgtatgcgctacgatgacaagcgcaaactcttgatcgtcgtttgtgacggtatgattattggtcagggtaacgacaggcccacgccgcgcattgtgctcgatattttgggtgtctcggagacggtcgatccagagcctctcagcttcgaatctctgggtgagggtctcaagcagcacaacatgggcaaggtttactcgggcttgtacgaggttcaaggtcacatcgtccccttcttggtggtcgtcaaggtcggcaagccatccgaggtgtcgcgccccggtaaccgtggcaagcgtgattctcaaatggttatcatgcgcttcctgaaccgtgtccactacaacttggccatgagcccgttggagctcgagatgtaccatcagatccgcaacattattggtgtgaacccgacattctacgaatacatgcttcagatcgatgccgacacggttgttgctgccgattcagcgactcgtttcgtctcagctttcctggatgacacccgcctgattgcatgctgtggagagacgtcgatcgccaacgccaaatcttcattcatcactatgattcaagtttacgagtactatatttcgcacaacttgtccaaggccttcgaatctctgttcggctccgttacttgtttgccaggttgtttctccatgtaccgtatccgcgccgccgagacgggtaagccgctcttcgtctcccgcgaggttgtcgatgcatacgccactatccgcgtcgacacgcttcacatgaagaacctgcttcaccttggtgaggatcgttacctgaccacgcttctgctcaaataccacaacaagtacaagaccaagtacatttaccgagcacatgcttggaccattgcccccgactcatggaaggtcttcctctcacaacgtcgtcgctggatcaactcgacggtgcacaacttgatcgagcttattcccatgggccaactttgcggtttctgctgtttctcgatgcgtttcatcgttttcatcgatttgctctctaccatcattcagcccgtcaccattgcctacattgtttacctcatcgtgcgcatggtcctcactcctgatctggtccccgttctggctttcgtgctgctcgcggcagtttacggccttcaagctatcatcttcatcctccgccgcaagtgggagatgattgcatggatgattctatacattatcgccatgccaattttctcgtttggtctgcccctgtatgccttctggcacatggacgatttcacatggggtaatactcgtgtcgttaccggagagaagggtaagaaggtcgttgtcactgacgagggcaagttcgatccctcatccatccctcgcaagaagtgggaggagtaccagagcgagctgtgggatgcccagacctccaaggatgacaccaggtctgaggcttccggcttctcgtacgccaccaaggcccccgtcgcggtctccgagtatggtttccccgtcaacccctatggcgcataccctcccagccgacctgggagcaccacgggcataccacacatgccacacatgccatactcggccagccgcatgtcattggcccattcggagatgctcatggcgggcaacagacaaagccagttcggtggatcacagttcaacctccctcaatctggcagcgaaatggaactttcaaacctggctggcttgccatcagatgatgccttgcttgccgagattcgggagatcctgagaacggcagatttgatgacggtcaccaagaagggtgtcaagcaagagctcgagcgcaggttcggtgtaaacctcgacagcaggagggcgtacatcaacagcgccaccgaagcactcttgtctggccagctgtag

SEQ ID NO: 328 - DNA, 2487 bp, Magnaporthe oryzae
  source 1..2487: mol_type = genomic DNA
atgggcaatccctttgaaggatggccggtacacgatatcgtttacacggtaatcgtcggcctggtcatgttggctgccgtcctggagtggttcctctgggtggcggccttcatgtattgtcttgttaaggtgtttataaaggcggagcattggacgattcgggctctcgcggttgtggttgccatccttttcgtcggattcagagcggtcttcttgccaatcatggtagtgacactgcccttaccaagcgctattgtgaaactctggccggaagacatggttgtgggactacagtggtttgccttctgggcgttcgccggtctcctgacgatcccatggcttttctgtgtctaccatttcgtcaccaaccagctaggccgagagaagcgtgtcaagcaggtgctggatgaggtctcggccccaaaggttgtcatcgtcatgccttgctacaaggaagacccagaggttttactcgtggccatgaactcaatcgtcgactgcgactacccgccatcttgtatccacgtgttcctgtcctttgacggagaccaagtggacgagctttatctcaacacaatcgaaacggtcggcgtgccgctcaccttggactcgtaccctaagagcatcgacgtcacttacaaggctgcccgtatcaccatctcccgcttcccccacggcggtaagcgtcactgccaaaaggcaacgttcaagctcatcgacaaggtctacaaggaatacctcgagcgcaacgacaatctcttcattctgttcatcgacagtgactgcattctggaccgtgtgtgcctccagaacttcatctacgacatggagctgagccctggaaactcgagggacatgttggccatgactggagtcattacttccacgaccaaaaagcacagtcttattaccgtccttcaagacttggaatacatccacggtcagcttttcgagcgtacggtcgagtctggatgtggtgctgtcacctgtctgcccggagctctcaccatgttgcgtttctctgcgttcaggaggatggccaagtactactttgctgacaaggccgagcagtgtgaggatctcttcgattttgccaagtgccatttaggcgaggaccgctggttgacgcacttgttcatgatcggtgccaagaagcgataccagatccaaatgtgtacctcagccttctgcaagaccgaagccgtgcagaccatgcagtctctggtcaagcagcgccgtcgttggttcttggggtttatcaccaacgaagtttgcatgttgactgactggcgtctatggacgcgttacccgctcttggtgttgatccgcttcatgcagaacaccattcgtaccaccgctcttctcttcttcatcatggttttggctatccttaccacctcgaagcgggtcagtgacctgcctgtcggtttcatcgccatctcgctcggtctcaattggctcatgatgatctactttggcgccaagctccgccgcttcaagatctggctgtaccccctgatgttcgtactcaatcccttcttcaactggtggtacatggtctacggtattttcacggccggtcagcgcacctggggtggacctcgtgccgacgccgccgccgccgacggagacaccaccgcccaacaggccatcgaggcggccgagaaggccggcgatgacctcaatatcgtgcccgagaccttcatcccggcggcgcagatcaagcgcaaggagagcggcaggcggcgcatcgtggccggtggcaacatccagccctcggccaagatcgacggcatgtttgccatccccgagcgtggcgccaacggttggtaccagcacgacaacatctcgctattcacggttgcccacggccacactggccgcgttcctctgcaccctcgtgactcattcgacagtttcttgtctgcgcagacggccctgaactcggtctacatcccgcgccgtgtcgagagtataatgggtgacgaggatcggcgcaagtacgagctcgcccaggccagccagtttaaccagttcctctccaaccagcgccgctcgaccaacggcgagccgccgcagggccaggtgtacgagtatagtgacgtcgacctgcaaaaggccgggtacactgacaacccgctgccgcccacgcctggagagactgcctctgctgttcctgccgccctcaatctgcaccacaaggttggcagcaccgacagcctcgttagtcttgggtcttcagcgtccaacagcaaccaacgggaccgcggaaggcagcgcaccctgatgccaccaacctcctcacaggcccggaccggtaggagtccactcggccgggcgagcttcttgcgcacgtcgacgattgaggacattgagctggagattggcacaagccatggaagcagcgcaaacagacctgcactgagcaggcaagcgtcgaacaacgaccccaacaacagcaacagcggcggccatcagcaacggtag

SEQ ID NO: 329 - DNA, 1158 bp, Phytophthora infestans
  source 1..1158: mol_type = genomic DNA
atggctccgactgtccaaacgtgtgatcctgtactggtgtgcgaccctgtcctcctgtgtgaccgaagtgactccgtgctggcgagcgaccctgttccgccacagaatctctcgttcgtgctcgaaaaggggggagcagtcaagtttgaagatcgtcccgtgcctgaaattaaggacccacatgacgtgatcttgaacgtacgctacacgggaatctgtggtagtgatgtgcactactgcacgcacggctgtatcggcaagtacgtggtggataagcccatggtgctaggccacgagtctgctggcgtcgtccatgccgtgggatccgccgtcaagtctctcaaggtaggtgacgaagtggccatggagccgggtgtgccgtgccgccgttgcgtccgctgtctcgagggaaactacaacttgtgtccggatatggcgttcgcagccacgccgccgtacgacggcacactggccaagttctaccgcatgccggaggacttctgctacaagctgccgtccaccgtcagtatgcaagagggagcgatgctcgaacccacagccgtggccgttcacttctgccgtctggccaaggtgtccccgggtcagaaagtcgtcgtgtttggtgtcggtcccgtgggtctgttgacctgcaaagtggctcgttacgtgttcggagccacaacagtcgtcggcgtggacgtcaatgagaaacgtcttgcggtcgccaaggaacacggcgcgacgcacgtgtatcaggggaagtccggcgtgacaccacaggagtcggccgagcagatcattgccgagtgcggactgggcgacggggccgacgtcgtgattgacgcgagtggagcggagccctgcattcagacggcaatctacgtcgcacgcagcggtggcacgttcacgcagggaggtatgggcaagacagacatcacgttccccattggcatcatgtgcggcaaggagctccgcgtgaccggcagcttccggtactctgcaggcgactaccaactggcgctcgatatggttgcaagtgggcagctgaacgtcaagggtctcatctcgaagattgtgccgttcgaggaagccaaggaggctttcgacaatgtccagcgcggtaacggcatcaagtggctcattgaaggacccaagtga

SEQ ID NO: 330 - DNA, 3907 bp, Fusarium graminearum
  source 1..3907: mol_type = genomic DNA
gatcttcgcttggccttgctccactaagaaggagtttcactagcggcccgcgatagctagcctgatcctagtctttacctcctcaacagtaacaccttctttcaccaccacaagctgagtcttgctcctttgttggaaacagtgaccggattcacacctgacctctggcaatcaataatttttgacccaagtcaggaacttatggctctgtgacagcaaacaagcgctgctgttgctgatttgctttggctgccattcactgacattgattgactggtggcaactaccaacaaacaccttctctcacataaatatacctactacctatctaattcctctccaatttcttccccgtcaactctctttctgcgcatcagcacacggatatcaactaagaatatgagcgacatttatcaacactctttcttgaagttttaaaacacaatatctttacttctttcgctatcaaacacatccttacatacattgacatcctctttggcccattctttgagtacccagacattatctcatcatggcggacagaggtgatcgaggcggccgtggaggccgtggccgtggcggacgcggcggcggctatcaagatggtcgaggaggcggacgaggtggcggagatgggagaggacgaggtgatggtggtttccgtggcggcagaggacgaggtgagggaggacgtggtgacttccgaggcggcttcagtggtcctagaggcggccgtggaggttctgatcgcgggagaggaggatacaggggaggccgaggtggagggcaattctcaaacgagccgtctttcttcaagatcgaatccggtgttcctcagcccgatgctgctattaccaagctcgaggatgaggtggtaaagaatcaaaataattctgttgcccagcttacatcgaaaatgtccaagttgggagtagaagaaaaggagcatttgagcaaattccctccacgacctgcatttggaaacaaaggccgtccagtcactttatgggcaaactattaccagatcgacaccaatattcccatgcttttcaaatacacaatttctgtcaaagagatcgtagctgaatcagaagaaaagaccgacaagcccactgtcgcccagcctaaggggaaagggaaaggaaaaggcaagcccggaaagcctaagaagtccggttctgtcgaagtcaagggacgtaaacttttcttggtcatcaaagagactctaaacgagctcaccaagaaggacaagagcctgcttcttgcgaccgagttcaagtctcagcttatctccttgcgcaagcttgaccttggacttgacaactcatttcgagtaaacctcccgtcatcagcaaaccccgacaagaccgaagtctttgaagtgaccttaaatggccctgaagtagcccgagttgacgagatgctcaagtacgtcaaatcgaataccagtgcttcacatgacgccccaggcaaacttgccgacgacgacgacgatgcagcaaaagccctggcattcccaaaattccctgatgttgttgatgccctgaatgtcatctttgggtttggcccgaggtcgaacgaagacattagtgctgtcggaaactcccgattcttctctttcaagaacggtggtatctgcagggatatgagcatgcgtgggagacccttacaagctgttcgtgggacattccagtctgtccgcctaggtaccggccgacttcttttaaacacaaacatcactgttggcattttcaagatatccggtaactgtgccaagctcttccaggatctcaatgtctttgaagcacagaagtcggaatggcggaaagtgaataacgcgaagttgatgaacaaatttctcccaaaaacccgcgtactggcaacgatgaagtttgccaatgacaagaaagtccaacgacggaaagcaatttacagtctggcctatgcacctgagattgaacgagcctgtcgtggcaacgatcatcctccccggttcacgaagggttatgaataccctggaccaggcaacgtgagcttctacatggtgtctgattctaaagggaccggtgaatatatcactgtcagagaattctacaagcggaaatacaacgacactacgctcaaagactaccctcttcttaatctcggcactgccgcaaacccgaactttaccccagcggagtatgtcgagatcctaccgggacagtcagtcaaggcgaagttgaatagccaagaatcgaccgcgatggtcgattttgcctgtcggtcaccttacgccaatgctttatccattacgaaagatgcgcgggaaactctaggtcttgacgacgagaaattggtgtacaagcccggcaaaagcatacaaaaatggacctatgtcaatgtcaaaccaggaggcaggtctgggccggttccaaagcgcactgtgatggaatttgctcaggtcatgagacaaatgaatattggaatcagcagcaaccctgtagacccttgcacagaggtcatcacccaagaagattacgctcaaggacgttcagatgctttcttcaaatgggcgaagcagaatcgcatagagtttatacttgtgattcttggtacatcagagtccgaaacatacggcaggatcaagacattgggcgactgcacctatggtattcacacctgctgcgcccaggccgaaaagtttggattcaacagaaaccctctgccatatttcgccaactgtgctctcaaatggaacctgaaggcaggtggtgtaaaccacaagctccacaacgagttcggtctcattaaagagggcaaaacgatgttggtaggatatgacgtcacccacccaaccaacatgccttcaggccagggtgatgatgctcccagtttggtcggattggtggccaccattgaccgagatatgggacaatggccagcctactcttgggaacagtcgtccaaacaggagatgttggacgagactttgactgaagcattcaagtcacgacttgcactttggcaaatgcacaaccgacagcagctgcctgagaacatcgttatattccgtgatggcgtgtcggagggccagtttgcccaagttttacaaagagagctaccacgcattcgcattgcctgcaatgccaagtaccccaagaacaagccaccaagaatttctctgatcgtttccgtcaagcgacatcagactcgcttttatcctacttcttccgagagcatgacgtccaagaacaatatcgaaaacggtaccatcgtcgatcgtggtgtcacgcaggctcgatactgggacttctttcttactgcacactccagcatcaaaggcacggctcgccctgcgcactacactgtgttgctggacgaggtcttccgagcgaagtacggagccgaggcagccaatgaattggagagatatgcccacgagctctgctacttgtttggccgagccaccaaggctgtgagcatttgccccccggcatactatgcagacgttgtgtgcactcgagcgagatgttacagacctgagttcttcgaaatcagtgacgttgaaagtgtctcaacagctgggccgggcttaggtgccagtgacccaaagcaggtccatgcggacctcgccaactcgatgtactatatctaagtgtgccgtgtgtgggagatgagttcgctcttttgggctacaaacagagacgagaaatgaagcttttttttttggggggggggttttttttgggaaattggtaggtttctgttaaaggtatgaggtagcgggatatctttgattgtctttcgtttggtttatatcgttttgtcctcatctttgacttaggacagaatagttaggatagcggaaacagcttgcagtcttgtatttggtacttgaagttgcaaggttatacatagcaat

SEQ ID NO: 331 - DNA, 2955 bp, Fusarium graminearum
  source 1..2955: mol_type = genomic DNA
atgtctgatagagggcgctcaccctctccagggggtccctcagggcctgggaggcgaccttcacagtccccagcccgatcggcaactggctctggtagtggacctgctggcggctatgcaaagcccctgggctacgatcctgcgaagcctccaaagcaggaggaccagggaaacacacgaatggaactacctccagatgcgtacatttccgagaccaaaaaggatatgtttactttaagaaacaatcgtttcaacactgagggaaagcctgagcacatcgaggtcaaccagtaccgaatgaccaagttcgacttcaacaagaagatctaccagtacgatgttgtactttcgcctagccctgacaagatcggtccggtcatgaagaagatttgggctcatcctgttaccgtgaagaccatgaagccctacaagcttgagatgtggcttttcgacggtaagaaactggcatggagccccgcgcttgtcgaccgtggtgaacttcggttcagtgtcgatctagacgaaggccaacgtcctcctggagccaagcctcgggatggtggcaagttcctagtcactattcgaaagaccaccgagatccaagttgctgctctgcagggctatctgtctcacaagatgtccttcaataacagtgttcaagaggcactgaacttcattgatcaccttgttcgacagttcccctccaggaacctacttgctatcaagcgaaacttttaccaaactggtcgacctggagctcctcttcaagacggagccatcgttgaggtccacaagggaacctacgcttcaatccgaatgagtgacaacttgaagcaaggtggtgtcggacttggctacaacattgatgtcgccaacacctgtttctggattggcaaccagccattggacaggatggcctgcaactttcttgctaccattgacccaagcaagttccgaggacacactcctgcgactctcaatgagatcctgaagccagtcaggaataggagtggcgggtgggagtcatctgatggcttcaagcaacttcgcaagttgcgacgcctcaaattcaagatcaagcacaagggccgcccaaacgaggacaagctgtacacgatcatggactttgcattcgatgccaagtttggtgaagctggtcacacctcccgcacccacacctttgagaaggatggaaaggacatcagcgtctatgactactacaagaaaatgtacaatgtcaccctgcgactttcccaccttcctcttatcaacgctggaaagggtggcttcattcccatggagcttgccttcgttgagagcatgcaacgatacccattcaagctcaaccccgaccagacagctgcgatgatcaagatcgcggtcacccgccctgccgtacgcaaagccgacatccaaaagggagctgccgctcttcagatcggtcaagatccttatctgagggagtatggtgtcaatttcgaagcccagtttgcgaagaccgaggctcgtatcttgcctccccctactgtcaggtttggccagggcacagcggaacccaagttcgctggtcgctgggacttgcgaggaaagaagttcttcaagcagaacaccgcccccctccagaactggggctttgttgcctgtgaagcacctgtcccacaggctgttctttcagcattcgccacaacattcaagaccactttccttggtcatggcggcaaggtgactggagaccccatgcttctcaatgcacctagcaacctgcgttttgaacccggaaagctggttgagtgggctcatgaggagatcactcgccgaaaaggctacacacaactcttgttcattgtcgtgtccaagaagaacagtggtacctacgagcgcctcaagaagtctgctgattgcagatacggcattctcagccaggttgtccttggtagccatgtgcagaagaacaatggccaataccactccaacgtttgcatgaaggtgaacgccaagcttggtggtgccactgcctgcacgcctcctctgtggaagactcccacattcttccccgacagccgcccaaccatcattgtaggttgcgatgtctcccacgctgctcccggtggtgcgactgcttcagttgcttccatgaccatgtctgtggaccccaatgccactcgatacgccgcagtcgctcagacaaatggatatcgcgtcgagatgcttacccccagcaacattcgactcatgtttgcagaacttcttcctcagtggcgacacaaccacccaggaaagatacctgctcatctgatctacatgcgagatggagttagtgaaggccagttcgctcatgtattggagcaggaggtatccgaaatcaagaaattctttggaggcagcctcccccccgacaagattcccaagatgacagtcatcatcgctacgaagcgtcaccatgtacgcttctttccacagaggggtgacaagaacggaaatcccttgcccggtactctggttgagaaggaagttacccaccctttcatgtttgacttctacctcaactcccatgttgctatccagggaactgcacgccccgtgcactactcagtgattctggatgagatggctatgccagtgaatgatctgcagaagatgatttaccagcagtgctattcctacgcccgctcaaccacccccgtctcccttcacccggcggtctactacgcgcatctcgctagcaaccgagctcgtgcacacgagaacgtcgcaaccagtgatggatttagaaccggtgccaaggggcatgagattattcgggagaagcaagcccatggcatcacctcggacgctcctaacaggaccgctgatgcaccccccctgatccgtctaggaggcccttgtggacagactcctgctgatggcgagaagcgccaacgagattttttccgcagtaccatgtggtacatctaa

SEQ ID NO: 332 - DNA, 1494 bp, Fusarium graminearum
  source 1..1494: mol_type = genomic DNA
atgtcggacctacaaagccgcttggagaagctgcaggagcttttgggcaacggcgtgaagcttgctgaaacgccacacgaagacaacacaacagatggttccgctgcaaatggccttgggaatagcttcggaatggtgatggatgatgagtacatccggaacgaggagcggcttgcagctagagagcaggcctcccaggaacagctgcgagccgatgctgatgccgccagacaaggcctgctcaaaggtaataaggaaaaagccttcgacaacgctgcttttcgcatcggccagcccgttcacaaggactttgctttctgtccgtttaaggtcgtcgtgtcgtatcccgaacgtttcatcggcaaggccaacaagcctcgtgtgaagccatttttcactgaaattctcaagggccgaacttgggactttttctatcttcatgacccgattgagccagccagagacccgtacctcttgattccatccgcccagttcgaggttttcctcgaagaaatcaatctcaaactgaacactttcctcagaatccctgtttgtcccatgaacaaggacaagttctacatgaagtttggtgaaggcggcacccctcgtcctcgttacttgagacgatctttggatgcgacctctcttgacatccggccgtggcctgcagtcgaccccgaagacgtcagatccttcgaagctgcctcggcaccgcaaaagctcacctggaggtccaagatgcgaatcgttaagtccggcttcgcaccaaagaggacggcagatccagacaaggctgcgaagaagaagcgtcacagggaccaaatgctgcgcaacacattgggctacttgggtcttgcgggagatccggatggccacgacatcgttttcatctgtgtcgacgttgaagccattgaacgtaagccaaaccctatctctgaagttgggatttctatcctggacacacgggacatcaaaggcgttcaccctaaggatgctggtcgtggttggtggcctatgatcaagactcatcatcttcgagtgcatgagtatgccagtttacgaaactaccaatttgtcaaggggtgccctgactcttttgactttgggaatagcgtattcccttacaaggacgagcttcaagaagtcatcatgagcatctttaacccctatatttcctctcaacgggaacttgtcgtcgttgggcatgatgtgcgacaagacatcacctacttcaacgatataggtatagatctccgagcccttgcaggactgagagagcctatcgacacccagggcatgcaccaagcttggtgcagctcaaccaatggacgaggcctcgtcaccgtactcaacgatctgaacattccaaacaagaatctgcacaacgccggaaatgatgcccactacacgctctgcgccatgctaggaattgcggtggtagaggtcaatgggaacgagcaacagagcaacgaaatgcttaacaaggttgactga

SEQ ID NO: 333 - DNA, 4488 bp, Fusarium graminearum
  source 1..4488: mol_type = genomic DNA
atggacaccgactcgaccgacagcgaagatgatcgcgttcagtatcgcctgaccgtgaggccttcgaagcatcgaaagaatacagagaagaagcgcctgaacaagcaggttttgaaacaatacatgatagaacacgacagagaagcctatgccaaagattctgagaaaaagaagcgcggccccttcgctgaagcttccaccgacattacaccgcgagaatatcagatagaactcttcgaagccgccaaggagaagaatctcattgtggttttacctacaggcacaggttctggtaaaacactcatctccatcttattgctaaaatactacattcgaatcgaagtggaatctcgcgctcttggaaatccgaggaaggtggcctttttcttggtggaaaaagtagccctctgtgagcagcaataccgatttcttaaggaccagattttcggccacaacattgtcatgttcacaggcgataaccgcggcgtgaccaaggacaagaagtactgggatgatcagttttcctcaaacaaggttgtggtctgcactgctcacattttgctcgactgtctgaacaacggcttcattacaatggaccagatcaacctcctcatcttcgacgaagcccatcatgcaaagaagaagcatgattacgcgcaaattgtccgacgatattattattctaccgaaaagaacaagagacctcgcattctaggaatgaccgcttcccctgtggattccaaggctggagatgttgcagaactggcacttgaacttgagaaaacccttgacagcgagatcgcaacactctccgacaagatgatgcgacaggcgactgatttccaagttcatgttgaagagacagtcaaatacaacacacttggactaccagacgagaccaagacacagctttgggactcgatctctaagctagtatcgcgaaacaaggaattcaaggcgtctctcgacttcacaaaagaggcctccacaatcctaggaccctggtgtgcggaccgatactggcaagtcttgatcgacgatacagagatcaagcgactcgccgacaggactcgcatggcttttttcgggggtggagagaagttgttggcaagaggagaccaagcagaagaggctgtcagggaggttcaaaaggtcgtcgcagcccacgagtttagggcgatcagtcctcaatcgcaggaattgtcagctaaagtgaaatgtctacatgaaatcctggttcatgccttcacagtcgataacacaaagcgctgcatcgtttttgttgatcagagacacacagcttgcctcctttcggacctttacgaccaagtttcaatggcaattcccggtatgaatgcttcgtatatgattggtcaacaatctagcagcagcacccttggcaatatgtctctgcgaaagcaatgttcaacgctcaagaactttagggacggcgtgataaactgtctctttgcaacatcagtggcagaggagggaattgacattccgagttgtgatcttgttatccgatttgatctctatacttctgttattcagtatgttcaatccaaagggcgtgcgagacacgaatcttcacggtatatcaccatgctggaagacggcaacatgagacagattcgcagtctgaaacaagcagcgagagatgcaacagcccttcgagagttctgtctaagaatacctgccgatcgaaaacttcaagacgatgtatttgatgaggagacggaaagtcagatcaagcaaatacgttttaacgtgtacaaaatagaatcaacgggcgcacaacttacattcccctcaagcctcgagatactagctcgattcgttgcatccttgggtacagcagagagcagccatagcaaggctgaatatcacgtctacaaggtgggaacatatttcacagccgccgtcaatctaccgtccagttcccccatcgtctcccaaacaggctatccacaacgaagcaagcttctcgcaaaatgctcagcggcttttgaggtttgcaagaagctcatcaatggcaaacacattgatgatcatcttcagcctactttcaagaaacatttccacaaaatgcgcaatgctcgtgtgggaataagccctaacaagaagggtgagcatgacatgcgcctgaggcccaacgtttggagtatccgtggagaatggacacacttcttcccaacaagaattactcttgacagggattgtggagagaaaaacaggtcgttgattcttctttcgcgaagtccacttccaggactaccttcaatccctctattcttcggcaatggacgctcagccatcgttgaagtgacatgttctcaagaacctttacccatcacgaccgaggaagctgggggtttgactgctttcacactcaaaatctttgccgacgttttcagtaaagagtttgaggccacttgcgaccagtttccttaccttcttgcccccttggcaaaagacaccaatctaaacgaaatatcgcgaatcgactgggatactgtcaaccttgtcagagaccatgacagtctcgaatgggagaatgcgcccgacgatttctttttcgacaagcttgttgtagatccatatgatggagggcgcaagcttataatcaaaggcattgacaaatccaagaagccttctgatcctacaccggagggagtgcctgagtcgagaagtcgtgcttataggtctgcggaacaaaacattaagcagtacagcaacagtctgttttccaagtctcgactaacggcccagtggcgagacgatcaaccggttgtcaaagctgagcttctctcattgcgacgcaatctgttggacgagtttcaagtaaacgaggaaatcaacaaggattgcttcgtcattttagaacccctcaacgtgtcacctctgccaattgacgtcgtttccatggcactcaagttcccggcaatcatccacagaatcgattctgctctgatcgctcttgatgcatgcgaactattcgacctctctattccgccagcgctggcactcgaggcaatgaccaaagacagcgacaacactgaggatcatggcaagcaacaaatcaatttccaagctggcatgggttccaactatgaaaggttggaatttcttggagactcgtttctcaaaatggccaccacaatctccatttttgtactcaaacccaagagcaacgaatgtttgtaccatgtagagcgcatgctgctcatctgcaacaacaatctgttcaacacggccgtagattgcaagctcccagagtacatacgatccttggcattcgacaggcgaacttggtaccctgatcttacactcagaaaaggcaaagctttcaaggcaacagcgcgacagcgcttagccgacaaaagtattgcggatgtctgtgaagctctcattggtgctgcatacctctcaagcaaggatgacaatttgaacatggccgtcaaagctgtgtcacagatgtgcaaagcaaagtaccataccatgatggcttacgatgagtactacgcatctttcaaggttccagattggcagaaagccagtccaaacgccaaccagcgtagacttgtgcagaaagtggcagacgctaccgggtaccacttcaagtctgcgccgctgctccagagtgcattcacacacccttcttacgcgtattcagggaacgttccaaactatcaacgcctcgagtttctaggcgatgccctcatcgacatgaccatcgtcgaatatctctatcgcaactttcccctcgcagaccctcagtggttgacggagcacaagatggcaatggcctcgaaccaatttctcggttgtctgtgtgttaagctcaatctgcaccaccatcttctgttcaacacgtcgcagttcatcagcaaaattcgtgactatgtggccgaacttgagttggctgaagagactgcgcgccaagaggcagaagaagacgggactccaatgcgcatggacttttggctcaatgcgacaacgcctccaaaagcgtacgcagattcaatcgaggctcttatgggggccatgtttgtggattctgaattcgactattctgttgttgaggatttctttaccaagttcatcttcccgtactttaaagacatgtctctgtacgatacctttgcaaacaagcatccttacacatttctcaccaagaagatgcaacaggagatcgggtgcatgaaattctgtatgatttcagacacccgcgttcctgatgcagagcgtggcatggaagttatgaaagagtacgacatatattcagcctttcaagtgcacgaaagagtcatcacatgtcacgtatcaaagagtggaaggtacggtaagattgctgctgcaaagggggcactcgagttgttggagccgtatggcggtgatgtggtcgcgatgaagaagctgttgggctgcgactgcgactctgtaacagcagccatggcggagatggaccatggaacagctgtctaa

SEQ ID NO: 334 - DNA, 4356 bp, Fusarium graminearum
  source 1..4356: mol_type = genomic DNA
atgtcctcaagcgataaggtcatggcggacgcctcttccataccagactccgaggtcaaaacaatagcgtcgtcctcggtcgtcgagatctctgctacaggcgagaaggagataacgactcatatacctgtcgcagatacaccaatgtgctcagatgaccaggccaatgtgcaagagcaagacgaagaagttaagcctcagaaagtgacgcccaatccagaggtggtaaatccccgcggttaccagcgagagatgctggaacaaagcatcaaaaggaatgtcatcgttgcaatggacacgggaagtggtaaaactcaagtggccgtgatgcgcatccaacatgaactcgatacatgtgcaccagacaagattatctggttcttaggcaagacagtatcgctatgtgaacagcaatacagcgttgtccaaaggcaaatgccgtcggtatcgatgaaactgctaacggggcaattgaacatcgatgcatggtccgaggacgtctggccccgtatccttaatgggactcgtatcattgtctcgacctttgatatcctgcgagatgctttggaccatgcatttgtcaagatgaacatgctgtcccttatcgtcttcgatgaagttcataattgtgtaaagaatagctctggtcgaaaggttatggtgaatttctatcacgaacacaagaacgccggcatgcccgtgcctgctatcctgggtttaacagccagcccgatacagtcgaagtcaatccacgacgaaatccttgagctcgaggtcaccatggatgctgtatgcatcactccaacaattaaccggaaagaactcctccagcacgtcaacaagcccaatctttcccgagtattgtatgatgtggaagagcatccgactcgaacccccctaatgcagactctgcagtctgagtactcggcgatggacatcacccaggacccaagtattataaaggccaagcaacttatcgctaagggcgagaagactggacctgaaatactaagtatgttgatgaaacacaggaccttctctcagaagcagttaaagtccttatggaacaaaagcaaagacattcttgatgaactcgggccttgggctgctgacaagtacatctccgagttggtcagtctgtttctcaagagaatcgactcgccaatgacgtttaacgagtcctggagcaatgaggataggacctacctcgcaggtcatttgagacagatcgctgccagtccccatcagcccaaactaccagacagacacaacttggccgacaagacgaataaactaatccaggaactacttgcagcggatgaagatgtggtcggcattatattcgtcagatcaagggctgctgccaacgtcctttgtgctcttttgagggagcaccccgagattcgacagcgatatcgagtcggctctgtagtaggatccgcagccaccaagattcgaaagcaaaacatctacgagtatctgcccggcgcgactgccgatacattacgcgatttcaaaacaggcgccatcaaccttttggtctcgactagtgttcttgaagagggtattgatgtcgcagtgtgcaacctcgtcatatgtttcgatgagacaacgacactcaagtcccatatccaacgccgcggacgagctcgcaaacaaaaatcaaagatgatagtacttgctagatcttcatccgacgctcgggaatgggattccctagaaagagacatgaagagtcgttatgagcaggaaaggggagagttggacgctttagagatagaggctcgcactgaagcgacgtcctctttttcttatactgtgaaaaactcaggggctagattggacctcgagaattctcgccagcatctggaacatttttgtaacaaggttttccagcgagattacgttgatccgagacccgtctacattttccacaagaccgaactgggatcagcaccgccgactttcagcgcaacggtgactcttccctcgggtctgcctaagcacctccgaaggtgccaaggtggaggtggatggagatcagaaaagaatgcgatgaaggaagcggcttttcgtgcattcgtcatgctgcaccaagaaggtttggttagcgaccaccttcttcccctaaatgcagattcgaaagaagcagaagaagaggtgcagctaactgcgcccgagcttctatttgacccatggaaagacattgcacagcggtgggagaccacggctgagaaatggctctatgcttacgagttcgccgatcacgagtatgttactcctcttcatttcgagattgccttgcctgtgtgtcttccacgaccccgcgacatcacctttcatcctgaagagggacttaaatggcatgtcaaatgcacctcaatcaagaggatctccaatgatgaatgcttgggcttgccagatcatacgtcaaccctattggcgatgcattatggccaccgctggaacgtggaagatcgtgaccatgtgatcaaattcatatatgagaacaagaatctcacccgagatcaaattggatcggtacccttcggcgaaagcattgatgctctattggaaaagagagtcctggttcgggaccccaaaaatactcccttccactacgtcaaaatgatcccatcaaagcctccaaaagagcaagttcagcacccatttaatgaatacgaggaagcgccagaagaacagtatctagttgtggatcaatggacacgcaggtcggacctgttgcatgagataaaacccggtcaggggaagagctcttgcaccaaaccctaccgctgggttctcccgatttccagagcgactgttgatgaggttcctcggcgtgccgctaagtgcggtatgcttatcccttccatcattcacgaattggaggttcagctcatcgcgaatgaactgtcctcgacacttttggcgccagttggtatcacagatctgcaattggtgattgaagccatcagctcgcgtagcgctgcagagcctgttgactatgaacgtattgaatttttgggcgattcggttttgaagtattgcactgttattcaagcctactctgaacatcccttttggcccgaaggtctactcaaccatttcaaagaccgactagtctccaatacccgtttgactcgcatgtgccttgagacaggcctttccaagttcattttttccaaaacatttactggaatcaagtggagaccgctatatcgagacgaattcctagataagaagccagtcgatggtgtatcaaggtttgttggtccaaagactcttgctgatgtggtcgaggcacttgttggagcctcctaccaggatggaggaatcagcaaagctctggagtgcatcaaggttttcttgggcaccaagtgcaattggcatgatgacaaagtcgccagagacatactcttccgagcagcaattagcgacgtaccgttgccccccacgatggagcctttggaagagctcatcgggtacacatttcagaagaagtctctactcattgaggcaatgactcacgggtcgtatgcggctgatgggcagcagcgatcttatgaacaactcgagtttcttggagatgcggttcttgactacattgtcgtaacccgaatgttccaatctgaccccccagtgcccaatggacgcttacacatggtcaagactgccatggccaacgctgatttccttgcttttacaaacatgcaacatggactacgccggcctgaagttgaaataaatgagaacggcgaaccagtgcctacagaagtttcactgccgatatggaaattcatgcgtcatagctctccagagatgggtagaatcatgaatgagacccaggcccgatttgagagccttcaagaggaaatcaatgaggctaggacgaatggtaaacactacccctggacacttctcgctcgtcttcacccgaagaagttctactccgatattttcgaggctaccctaggtgccatttgggttgattcaggagatatcgaagtatgcacagcctttcttcacaagttcggcgtcttgccgtatcttgaccgaattctcagcgataatattcatgttcaacatcctaaagaggaactcgccaaactagcaatcgaccagaaaatgacgtatgattatacggctgttgatgggcctataaaggagtacctctgcacggccaaggttggagatcgcgtcgtgggagtcgtgtcaggggcactcaataaggctgaggcaatgaccaaggctgccgaagagggcgtgaattttttgaatggggagcagaaacgtgcagagaaggcggctcaggatgaaatggcgcgatttcttgttgccatggaactcatttag

SEQ ID NO: 335 - DNA, 156 bp, Verticillium nonalfalfae
  source 1..156: mol_type = genomic DNA
tcatgaccacagtcatgagttctcaccgaatgaagacccagggtcactgatcgactggagccatctgctgtcgaccaaagaggttgagtacttgccttgggatgaagatcacagtcccagcttctatcaaagcaagtttgtgattgatccatacac

SEQ ID NO: 336 - DNA, 156 bp, Verticillium nonalfalfae
  source 1..156: mol_type = genomic DNA
agaaggtcaacgatctactgccacaggcgacaaacaagaagccatatgctagggtttatccggcaccgtgggcgaaagtcgacacgattccattagatcatgcttactttggggcgttgatccctttcatttcacacattgtcgaggttcgactgg

SEQ ID NO: 337 - DNA, 2877 bp, Verticillium nonalfalfae
  source 1..2877: mol_type = genomic DNA
atgcccggcatcgctcgcaaggtcgtcatttgcgcggcgatcgacggcctcatcgtacagcctctgtcctccaaagggcagcgccctgcgcagcccgtccgcattggatatggtgacggtgccatttccccagcgccgcgggatcaactccctgatctcaccaagcccaacgcctcgttcgaggcttttggtgttgtgggcctgattaccctttcaaaactgaatttcctcattacaattacccgtcgacaccaggtcgctcaaattctaggatttcctatctacgttgtcaccgaggttgcgattacaccatgcgcctctcgccaggaagccgaggatgccgttcttcggacctccgtgcagctgcagacccgtactgatgatacggacacagaggattcggacagcgatagtaccatcgagttaatggcccacgctgtcgatgaggtcgacgatcagacgcagtcagagggctccatctcagcaggcgttaagagcaccgtcgccgaagacgtcatgagtcgtaaggggggctatggtcgattcgcccagcgctggttcagcagctccggctggatgcagggccagaaacgcaacgctggctggagctacacgacgaccgagttgcctcgagcttcgatggaccagcgcccggacctggagcccccggcggcatcgaaggtgcctctggaagaagaggacgacagagtcaacgaagcaaaggcgtcttctctgcttcccaaattgctccgaactgcgcaaattctttacgggtcatctaggagcttcttcttctcgtacgacgtagacataaccaggcactgggcgactcgagcacaatctccatctggtgagctgccactataccgtcgcgtcgaacctacattcttctggaaccgaaatacttctcagccattcattgattccggaaacgatgcgctagttctcccactcatgcagggattcgtcgggcagagggagtttaccatggataagagcccaccgcagcatgacgaagacgcgaataacgcactggaaatgtcaaacatgtctgctccaacatctccgccagggtcgccccctacagaagcgattcgcggctccctggatctccggggctcggaaaagaagttcctgattacggtgatttctcggcggtccattaagagagccggcctccgatatttgcgccgcggtattgatgaggatggccatgtggccaacgctgttgagacggagcaaattctgtctaactcttcgtgggatcagagctctaaaatttactcgttcctgcaaattcgcggcagtatacccctattcttcacccagagcccgtactcattgaaacctgcaccagtcatacaacactccacagaggcaaactttgaagcctctaagaagcacttcgagcgccttcaccgagaatatggtatgctgcaagtggtcagcttggtggaaaaacacaatgttgaggctacaatcggcaacgaataccagcatactgtcgcgaagctaaacgaaaccgtcttcagcgatcatacttctcaagtcccgttcgaatggtttgatttccacgcagcctgtcgtgggatgaagttcgaaaacgtcagcctccttctggatgccatgaggaccaagcttgatgagcttgggagcactgtcgaaaaggatggagagctgttccttcgccaacgtggagtgcttcggacaaattgcatggactgtctcgaccggacaaatgtttgccagagctcatttgcaaagtatatgctggaatcacagctcaaggctgagggatacgatctgagcatgcaagtagaccagcaatctgcatggttcaacacgctgtgggcggacaacggagactccgtgtcgaagcagtacgcttctacggcagccatgaaaggcgactacacacggtacaagactcggaactacagaggaatgctcaatgatcttggcttctcattgacaagattttataacggcatggttaatgactatttcagtcaagctgccattgacttcctccttggcaacgtcacttccatggtctttcaagagttcgaagctgaaatgatgacgaaagatcccgccatgtcgatgctcaagatgcgtgaatcagctatcgaattatgccagaaacgcgtcatctcagaccaaaaagaggactttgttggcggatgggtcatgctgagccctccaacgtctgacgttgtcaagtcacagacacccttcgaagaagtgattctccttctcacagatgctgccctttatctctgtcgctttgactggaagcttgacaaggtatcgtcgttcgaacgcgtcgacctcgcgcatatcgtgggtatccgcttcggcacttatattacatccacagtttcgcctggtcacaccgacgagagtaaaaacattgggttcgtggtgtcataccagcctggaaagactgacatccaacgcacaaatactcgtacgctttcgagcaactttatcaaacaacctggtcaggtcgaagaagagtcattggccgcggtggcggtcgacgagcctgcggcgctctcggggctgatgggactgctgtccggtcatcgacccaaaccccaaacaccgactcgaaagctcgccttcaaggcgccgtattcgcagtcgtcggccgcggtgacgggtgaggggccacgcttgagcgagacacagcaggttgtgagtatctgtgctgatgtcgagagactggccttcaaagcgcagcctggaaaggacgtgcctggaaccaagagcatcatcgagaggggtgacatcatctcattggaggacgcacaagcaaacacgacgattttagaccagctgagccactctatcaagaggcttgtttgggcgtag

SEQ ID NO: 338 - DNA, 4014 bp, Verticillium dahliae
  source 1..4014: mol_type = genomic DNA
atgtcagatctagcagtcggtcagatcgtccagctgaccgacggccgcaatggcgtcgtacgcttcgccggcaccacccatttcgcctcgggcgaatgggtcggcattgaattggaggatgactctggaaagaacgacggcagcgtccagggcgagcgctactttgactgttccatggggcgaggcatgtttgtgcggccgtcgaccctgaccattctcgcccaggctccagctccagctgcggcgccggccgccagacctaccgtcaggaagacgagcaggcccagcagcttcgtgcccggcacgggcagggtgtcgagcgtcaccgacccgagcatggccaagcggatgagtctgaatgctgctagtcccagcccggccccgcgcacatctcgacctgcgagccttgtacggtctcctacgaagtcgccaacgaagcaaattggttcgaccacctccagcaccgcaccctcccggaccggcacaccttcaaacgccaaaggcaccaccgccacgcgaactcgcccggcagtaggtgttcgcacctccatgggaccccctccgattccctccgcacgagtgagccgacagccatcaacatcgtcagcgacaggtcgccctcccgccaggccgctttccaatcgactctccctgtccggctcgcgcagcgtgcccaagccagaccccctccgacgcccatcgaccgattcgcaagcaggcagggagcccggctcggcagcagacagcggcgacgacggcaggagcagctcgccatctaagggagcggctgatctggcctcaccgcatgccacgagcccggtgcaagctcggaccaacgcgctcgagcggttgacctcgggcaggacggcgaccacgacggcacggtcgccagccacggcgtcgcctcgaacggccggcggcaacacggctgcggcgcgggagaacgaagacctcaaggcgaagctccgtgtcatggagcgcaagaggctggaagaccgggagaagctgaagcagctggagaagctccaaggcgaacgcgacaagtttgagtcgatcatccagaagctgcagacaaagtaccaaccccagcaaacggagaatgcagagctccgcaagcagatcaaggaggccgagacgcggttcgaggccgtggagcagatgcaggccgagcatgagacggccttggagctggccacgctggaccgtgagatggcggaagagacggccgaagtgctcaaggccgagctcgaagcgttgaagcagaaatcagaggagcttgagctcgaggtggaaatcttgcgagaggagaacgaggagtttagccagggcatgacgcccgaagagcggtcaagcacgggctggctgcagatggagaggacgaacgagcggttgagggaagcactgatacgattgcgcgacctgacccaggctcaagaggccgagcttcgagaccagatcaaggccctggagtctgacctgcaagactacagtaccgtgcaggagcagttcgcggcctccaaggaaaagctggcacagtctgaaagcgcggtcgaggatcttcgccaacagctcgacaatgctcttggagcggaggacatgattgaggacctcaccgagcgcaacatgagcatggccgaagagattgaggagctcaaggccgtcatcgaggatctcgaaaacctcaaggagatcaatgatgagctcgagattaatcacgtacaaaacgagaaggagatgcaggaggaactcgacttcaaggacagcgtcattgcggaacaggcccgacgagccggtcagcaagaggaagccctcgaagacatggagtacaccctttcgaggttcagggaactcgtcacgagcctgcagggcgaccttgaggacatgcgcgcatcgcacgctgtcaccgaggccgagtcggagcaattagacagcaagtcccgcgccatgatggacctcaacatgaagctccagatctcggctgccaagacacaggtcaagacgatcgacctggagcttcgccgtctggaggcgcaagaagcggagcagcacctcgaaatcgtcaagctcttcttgcccgagacctaccaggaggaccgcgactccgtgttggcgctccttcgcttcaagcgactggcgttcaaggccactctgctccagggcttcctcaaggaacgcgtcacgggccagccgcaccccggccacgaggacgacatgtttgccggctgcgatgccattgacaagctcacctgggtggcggccatgtgcggccgcttcatcaacgccatcagccactgctcgatcgagcagttccagcactaccagggcgctctgtttgagctggagccggtggagcgggcggtgaacgggtggatcgacggcctcaggagggatgaactcaaggaggccaagtgcgccagcgagctgcagcgctccattgcgctcatgacccatctcgccgaggttcaccttacggacgatctgcagagcttcgccgacgccatgcacatgcgcgctctcgtcgtgcaaagccatctggattcggccgccgcggccattacgaccgccagggccatggtccagagagtcatccccgagtctggcgaggacgacgagatggcacagcacttcagcaagaaggccgagcacgttgtcggccagacccgcagcaccaaggtcattgccagcaaggccgtgcgcgccctcgaggatctcaagaaccgatctctctcgctggctcgggacgacagcacgcaagaggcgtttgagcagtgcgaagaggccgcaaaggacctcgccgcactggcgcggcagattggcctcgacttgcacaagctgctgcacgaggagggcaggaccgagccatacacgcacacggaggtgcagaacacgatggcgcagacggccctgtcggccggttcgtcgaccgactcggatctcttctcgacctacgtgaccaagctccgggtcgtcacgcagcagatcacggaccttgcgggcctcagctctgacctgacgcagacgcaagagtttgagctcaacccggccccctggaagctccgctctcaagaactcaaggctctcaagacgatccccgtggatgccgaagaggagctccgccgcgtcaaggaggagcacaacgaggcgcgccgcacgattgcgcagcgcgacgagagcctcagcacggcgacgctcaagattgagacgctcgagtcccgcatgcgcgacgcgcaccaaaaggcgtcgcgcatcgccgaccttgaggcccagatcgagacggccaagcagcgcgcggcggcgctcaaggaggacattgaaaagggcgaccgcgagctcaaggcgctcgaggcggaccgcgaccagtggaagaagattgcgggcgacagcaaggcgttcgccggcgccaacgacgctggcgccgccaagtcgggccaggaacgggccgtggcgacggcgcgcgagatggacgccctcaaggccgacattgcgcacctgcaggcggcggtgcggtacctgcgcgaggacaaccggcgggcgcggctcacggagcaggccgactacgactggctcgcggcgccgctgcgcaaggcggcgtcgccggccgagcagcggcgcgcgctcgtcgtggccgagggccgcgacgcgctcggcgagctcgtgcggttcgcgacccaggccaaggtgtacgacctccaggacctgccgcaggacaagctcgcgtggcggccggccaagagcacgccgcagtaccacgccgcgcggcaggcggaggacctcgcggcctggaagggctggcgcgactcggtggtgcagaagacggaggtcgtcgccgggcgcaggggcggtggtgctccggacatgaagagggtcgaggcgctgcggcggagcgcggcggctgcgcgactgcagattcggctgccggggcccgacggcaagatggcgcggggcagcggacgggatgtgcagattgtcggatcgagggagtgggagggtctgcaggggcggttggccgtgtaa

SEQ ID NO: 339 - DNA, 1089 bp, Rhizoctonia solani
  source 1..1089: mol_type = genomic DNA
atgcgctccactgctactactttctcccttctctctttggctcctgccctgtttgcatccccagttgagcgttgtacaggtaccatatcatctttagatgatgttgccaatgcaatcaaatgtactactatcaatatcaactcgttcacagtacccgctggaaagactttccaactggatgcccccagtggcgctacagtcaacctattgggagacgttacgtttggcgtctctgcatgggcgggaccactattccaattgaccggaacaagcatcactttcaacggcaatggacataccttcaacggccaaggcgaacaatactgggacggtcttggaagcagtggaacgactaagcctcaccccatgatgaaaatcaaatcgtccggaacgttctcgaacgttgtagttaaaaactccccacagcaatgctttagcttcggcaacagcgcagctctgactgtttccaaggtcacagtcgacaattctgcaggagatgctgcgaacagcaagagtggtggtaaagctgctggtcataacacggacgggtttgatgtctcggtttccaatctcactatcgaagactccaccgtgcacaatcaagatgattgtctcgcaattaataaaggctccaacattattttccagcgtaacacatgcaccggtggacatgggatctcggtgggctctatcgactcggatgtcacagtcagtggcgtacagatccttaataatgtggtcacgaacaacgacaatggtcttcgcatcaagaccaaggctgctgccactggctccactgtatctggcattacctacaccggcaacaccgtcactggttgcaaaaagtacggtgtcatcattgaccagagttacccagatacccttggtactcctgggactggcgtcaaaatttctggcgtgaccttcagtggtaccaacaccgtttccgtcgttagtggagccaaggaggtcgaagtcaactgcggctcaggttcttgcacaggaacttggaattggtcgggtctcaaggtttctggtggatccgcgggggccatcaattactctggtatcaccggtttctcgctttaa

SEQ ID NO: 340 - DNA, 169 bp, Botrytis cinerea
  source 1..169: mol_type = genomic DNA
ttcgttccaggagttacacgcaaagatcacttcactggtggaccagcaaaaagatagtaaacatatcgggaaaatatcgatatatattctccgaattctacgagatatcagagcagaattacctagtaaccctgcactacaaaagtttggactctcacttgtctcatca

SEQ ID NO: 341 - DNA, 179 bp, Botrytis cinerea
  source 1..179: mol_type = genomic DNA
ttcgtgctctcgtcgaaagcaaagacaataaagaagaacaaatggagcgcgagttggagggattgcgaagaggaagtgttagcaatcctactacgcatcgtactagtgccatgagcagcggaactgtgactcaggataggaattctctccaagacaataagagcacagttgtaagctgg

SEQ ID NO: 342 - DNA, 168 bp, Botrytis cinerea
  source 1..168: mol_type = genomic DNA
acgttgttcaaagtgcagtggcaaagcgagcacttgaaatgcagttaaagaatgagggactagatgtcactctacaaattgatcaaactcaacaatggttcaatactttgtgggccgacaatggtgacgccatttctaagcaatacgcttctacagcagcattgaagg

SEQ ID NO: 343 - DNA, 259 bp, Sclerotinia sclerotiorum; identical to SEQ ID NO: 312
  source 1..259: mol_type = genomic DNA

SEQ ID NO: 344 - DNA, 200 bp, Sclerotinia sclerotiorum; identical to SEQ ID NO: 313
  source 1..200: mol_type = genomic DNA

SEQ ID NO: 345 - DNA, 230 bp, Sclerotinia sclerotiorum
  source 1..230: mol_type = genomic DNA
gcattggctgcgctgaagacgaaacctttattgaaagatgaaagtattcgagatttggagggattgagattagatgtatgtgagcggtggtttggtgatgaaattctttactttacaccttatgttcgacacgatgatttggaaggatcattagccgttgagacattaagaggttgggcgaagaaagcatcagaggtactactggaaggattcacaaagactcttcaagg

SEQ ID NO: 346 - DNA, 196 bp, Sclerotinia sclerotiorum
  source 1..196: mol_type = genomic DNA
tcaatgccagagattgacggttactcttcagcagcggaggatttctgtgaattgtgcgaggcatcaggtcatgatgttctacattgccccatgttcggtcctaatggtaatagtggcaactctagagaggagtctcctaaagagcaacgaacaggaaaagacgttgtcatggaaggactcaaactatcacccaaac

SEQ ID NO: 347 - DNA, 194 bp, Sclerotinia sclerotiorum
  source 1..194: mol_type = genomic DNA
gcttacatttccaagcaggaaatcaatggccgcttgactgaaataatcattaacaataccgctgtaaaatctagagatagaaagtcccatgtctgtcaaagcacccttgtaatcacgctttctagtacgagtgaagtctcccttcagggctgctgtagaggcatattgcttagagatagcatcgccattatcag

SEQ ID NO: 348 - DNA, 753 bp, Fusarium oxysporum
  source 1..753: mol_type = genomic DNA
atggagacggatatgcaccgagtcatccgcacccaggacctttctgacgaccactgccagtacttcatctaccagaccctccgcgccctcaaggccatgcactcagccaacgtgctgcaccgagacttgaagccctccaacctcctcctcaacgccaactgtgatctcaaggtttgcgattttggtcttgcgcgatccgctgcttcccaggaggacaactccggtttcatgactgaatacgtcgcgactcgatggtaccgtgcgcccgagatcatgttgactttcaaggagtacaccaaggctattgatgtgtggtcggttggctgcattctcgccgagatgctcagcggcaagcctcttttccctggcaaggactaccaccaccagttgacactcattctggatgtgctgggcacgccgactatggaggattactacggaatcaagtcgcgccgcgctagagaatacattcgatcgctccccttcaagaagaaggttcccttccgaactctattccccaagacctcggatctggccctcgacctgctcgagaagctcctcgcattcaaccctgttaagcgcattaccgtggaggaagctctgaagcacccataccttgagccttaccacgatcccgaggatgagccaacagcgcccccgatccctgaggagttctttgactttgacaagcacaaagacaacctgagcaaggagcagctgaagcagttgatctaccaggagattatgaggtaa

SEQ ID NO: 349 - DNA, 1074 bp, Fusarium oxysporum
  source 1..1074: mol_type = genomic DNA
atggccgagttcgtacgcgcccagatctttggcaccacattcgagatcacctcgagatactccgatctccagcctgttggcatgggagcttttggcctcgtttgctctgcccgggatcaacttaccaaccaaaatgtcgcagtcaagaagatcatgaagcctttcagcacacctgtgctcgcaaagcgcacataccgtgagctcaagctgctcaagcacctcaagcacgaaaacgtcatttctctcagcgacatctttatttctcctttggaagatatctattttgtcacagagctcctcggtaccgatcttcaccgattattgacatcgcgccctcttgagaagcagttcatccagtacttcctctaccaaattatgcgaggtctgaagtacgtgcattcggccggcgttgtccaccgcgatctcaaacccagcaatatcctcgtcaacgaaaactgtgatctcaagatttgcgactttggtcttgcacgaatccaggaccctcagatgactggttatgtctccacacgatactaccgagcccctgaaattatgctcacctggcaaaaatacgacgtcgaggttgatatttggagtgccggttgcatttttgctgagatgcttgagggcaaacctttgttccccggaaaagatcacgtcaaccaattctctatcatcactgagctacttggtacccctcctgatgatgttatcaacaccatcgccagcgagaacacactgcggttcgtgaagtcgctgcccaaacgcgagcgacagcctcttcgtaacaagttcaagaatgccgacgattcggctattgatctgctggagcgcatgcttgtcttcgaccctaagaagcgaataactgccacagaggccctgtcccacgactatctctctccctaccacgaccccacagacgagcccgtggcggaggagaagtttgactggagcttcaacgacgccgatctccccgttgatacatggaaaatcatgatgtactcggaaattctcgattatcataacgtggaagccggagttactaacatggaggagcaattcaacggacaataa

SEQ ID NO: 350 - DNA, 1965 bp, Fusarium oxysporum
  source 1..1965: mol_type = genomic DNA
atgtctgcctccgactcgatcccggcccccccggaggactggaaggatctgtcgacacctgcatctccaggctctgaagattcgtcagaacccagtacgccgctcgaatctcccggtcatgatagccccagtgagcctcctcgaagagtaccatctctgcgctccgtttccgatcctcgcaacatgaatccgaactcaactgctatgggtgttttaggcatggccagacgccctgtacaaacatcctcgagttttgctggaagtagtagtgcctcggtggaaaacagtataatggccaaagcccgagcattacatcaacaacgcatgcagaagggcatgtctcccgctggaatccccggaacaccctcggggtcatcacctacggccagcgtcgctaacggattccctaccaatctgggattgccgcccaatatgcaacgaccgcacgcaccacatgtaaattcagctcctgcgataacgaagccctcgctgagtgagagaagggccatgggcggcggcatgggcatgaagctgtctgatatgggtagacccagccctgtcaccgccactgggaagaaacgggggcctcctggaaagctttctgatatcacaggtgatgcgccaggtagtcaacaatccaacggaacagggggtgggcaggggtcaaaaatggacgatttcaagaaatatattgacacagagaagggttgggtgacctttgatggcgctgccacaatcacacggacaggtgtcaactttgccaatggccaaaccttcagcatatctcttgatgaagttgaagtcttgaccgagctgggtaaaggaaactacggaacagtctacaaggtcaagcatgccaagcgaagagtccctcgcttcggacaaggcctctcgagaaagccccttcctgttcagtattcgcagtcggacccttctcccattggatctgcggaagactccgccgagggcttgccagacacgaccgacggtacaacgggcacagtaatggcgatgaaagaaatgcgcctggagctcgacgacgccaaattcacaaccattctgaaggagctcgtcatcttacacgagtgtgtttctccgtatatcatcgacttttacggcgccttcttccaggaaggtgctgtttacatgtgtattgagtatatggatggcggatctatcgataagctgtataatggtggtatcccggagaatgttcttcgaaaaatcacatactctaccgtgatgggtctcaaatcactgaaggaggagcatagcattattcatcgcgatgtcaaaccaacaaacatcttggtcaatacacgaggccaggtcaagatttgcgattttggtgtcagtggtaatctggtagctagtatagcgcgaaccaacatcggctgtcagagctatatggcccccgagagaatctctggtggtggattcgcacaagccggtaattccgatggctcatacagcgttcagagcgatgtctggagtttgggcctgaccatcatcgagtgtgctaagggcgcttatccttacccaccggaggtctcttctactattttcagccaactgagtgctattgttgaaggtgaaccacctgctatgccagaggacacttactcggacatggccaaggattttgtgaaaagctgtcttcacaagattcctatgaagcggccaacctacgccatgctattgaaacatccgtggctcgtcgaatttacaaagcctcaaacaatcacggaagaagctgaggagggtgatggagttgatacggtcgcggaagctgttggtaaaattgatttgagctcatcaactgcagatactgaagtggcagattgggtcaatggcgttctacaacgagagaaagatggcctgaaggaggacgggcccttgaaaccagcactacacaatgcaccgcttgatagcgtcagtcctatgtcaagcccaaaggatgcatga

SEQ ID NO: 351 - DNA, 108 bp, Medicago truncatula
  source 1..108: mol_type = genomic DNA
gcnttyathcarytnwsnaarccntgyathwsngayaargartgywsnathgtnaaraaytaymgngcnmgntgymgnaarggntaytgygtnmgnmgnmgnathmgn

SEQ ID NO: 352 - DNA, 120 bp, Fagopyrum esculentum
  source 1..120: mol_type = genomic DNA
gcncartgyggngcncarggnggnggngcnacntgyccnggnggnytntgytgywsncartggggntggtgyggnwsnacnccnaartaytgyggngcnggntgycarwsnaaytgyaar

SEQ ID NO: 353 - DNA, 120 bp, Fagopyrum esculentum
  source 1..120: mol_type = genomic DNA
gcncartgyggngcncarggnggnggngcnacntgyccnggnggnytntgytgywsncartggggntggtgyggnwsnacnccnaartaytgyggngcnggntgycarwsnaaytgymgn

SEQ ID NO: 354 - DNA, 558 bp, Capsicum annuum
  source 1..558: mol_type = genomic DNA
atgatgaaygcnaayggnttywsnggngtngaraargartayathmgnaarcaycayytncaycarccnaargaraaycartgywsnwsnttyytngtnaarcayathmgngcnccngtncayytngtntggwsnytngtnmgnmgnttygaycarccncaraartayaarccnttygtnwsnmgntgyathgcncarggngayytngarathggnwsnytnmgngargtngaygtnaarwsnggnytnccngcnacnacnwsnacngarmgnytngarytnytngaygaygargarcayathytnwsnttymgnathathggnggngaycaymgnytnmgnaaytaywsnwsnathathwsnytncayccngargtnathgayggnmgnccnggnacnytngtnathgarwsnttygtngtngaygtnccncarggnaayacnaargaygaracntgytayttygtngargcnytnathaaytgyaayytnaarwsnytngcngaygtnwsngarmgnytngcngtncargaymgnacngarccnathgaycargtn

SEQ ID NO: 355 - DNA, 981 bp, Phaseolus vulgaris
  source 1..981: mol_type = genomic DNA
atgaaraaraaymgnatgatgathatgathtgywsngtnggngtngtntggatgytnytngtnggnggnwsntayggngarcartgyggnmgncargcnggnggngcnytntgyccnggnggnaaytgytgywsncarttyggntggtgyggnwsnacnacngaytaytgyggnaargaytgycarwsncartgyggnggnccnwsnccngcnccnacngayytnwsngcnytnathwsnmgnwsnacnttygaycargtnytnaarcaymgnaaygayggngcntgyccngcnaarggnttytayacntaygaygcnttyathgcngcngcnaargcntayccnwsnttyggnaayacnggngayacngcnacnmgnaarmgngarathgcngcnttyytnggncaracnwsncaygaracnacnggnggntgggcnacngcnccngayggnccntaygcntggggntaytgyttygtnmgngarmgnaayccnwsngcntaytgywsngcnacnccncarttyccntgygcnccnggncarcartaytayggnmgnggnccnathcarathwsntggaaytayaaytayggncartgyggnmgngcnathggngtngayytnytnaayaarccngayytngtngcnacngaywsngtnathwsnttyaarwsngcnytntggttytggatgacngcncarwsnccnaarccnwsnwsncaygaygtnathacnwsnmgntggacnccnwsnwsngcngaygtngcngcnmgnmgnytnccnggntayggnacngtnacnaayathathaayggnggnytngartgyggnmgnggncargaywsnmgngtncargaymgnathggnttyttyaarmgntaytgygayytnytnggngtnggntayggnaayaayytngaytgytaywsncaracnccnttyggnaaywsnytnttyytnwsngayytngtnacnwsncar

SEQ ID NO: 356 - DNA, 1020 bp, Oryza sativa
  source 1..1020: mol_type = genomic DNA
atgwsnacnccnmgngcngcngcnwsnytngcnaaraargcngcnytngtngcnytngcngtnytngcngcngcnytngcnacngcngcnmgngcngarcartgyggngcncargcnggnggngcnmgntgyccnaaytgyytntgytgywsnmgntggggntggtgyggnacnacnwsngayttytgyggngayggntgycarwsncartgywsnggntgyggnccnacnccnacnccnacnccnccnwsnccnwsngayggngtnggnwsnathgtnccnmgngayytnttygarmgnytnytnytncaymgnaaygayggngcntgyccngcnmgnggnttytayacntaygargcnttyytngcngcngcngcngcnttyccngcnttyggnggnacnggnaayacngaracnmgnaarmgngargtngcngcnttyytnggncaracnwsncaygaracnacnggnggntggccnacngcnccngayggnccnttywsntggggntaytgyttyaarcargarcaraayccnccnwsngaytaytgycarccnwsnccngartggccntgygcnccnggnmgnaartaytayggnmgnggnccnathcarytnwsnttyaayttyaaytayggnccngcnggnmgngcnathggngtngayytnytnwsnaayccngayytngtngcnacngaygcnacngtnwsnttyaaracngcnytntggttytggatgacnccncarggnaayaarccnwsnwsncaygaygtnathacnggnmgntgggcnccnwsnccngcngaygcngcngcnggnmgngcnccnggntayggngtnathacnaayathgtnaayggnggnytngartgyggncayggnccngaygaymgngtngcnaaymgnathggnttytaycarmgntaytgyggngcnttyggnathggnacnggnggnaayytngaytgytayaaycarmgnccnttyaaywsnggnwsnwsngtnggnytngcngarcar

SEQ ID NO: 357 - DNA, 759 bp, Solanum chilense
  source 1..759: mol_type = genomic DNA
atgaarttyaayathgtnwsnccngtngcnytnwsntgyytnttyttyytnttyytnacnggnacnytngcncaraaygcnggnwsnathgtnacnmgngarytnttygarcaratgytnwsnttymgnaayaaygaygcntgyccngcnaarggnttytayacntaygaygcnttyathgcngcngcnaaywsnttyccnggnttyggnacnacnggngaygayacngcnmgnaaraargarathgcngcnttyttyggncaracnwsncaygaracnaarggnggnwsngcnggnacnttyacnggnggntaytgyttygtnmgncarathgaycarwsngaymgntaytayggnmgnggnccnathcarytnacncaycarwsnaaytaygarmgngcnggncarggnathggngtnggncargayytngtnaayaayccngayytngtngcnacngayccnathathwsnttymgnacngcnathtggttytggatgacngcncargayaayaarccnwsntgycayaaygtnathathggncartggacnccnwsnccngcngayacngcngcnaaymgngtnccnggntayggngtnathacnaayathathaayggnggnytngartgyaayatgggnccnaayacngcngtngarwsnmgnathggnttytaymgnmgntaytgyggnatgytnaaygtnccnacnggngaraayytngaytgyaayaaycaraaraayttygcncarggn

SEQ ID NO: 358 - DNA, 998 bp, Hordeum vulgare
  source 1..998: mol_type = genomic DNA
ctacgacagtagcgtaagcgtaacaccgagtacgtactctgtgctttgttggctcgcacaatgagatcgctcgcggtggtggtggccgtggtagccacggtggccatggccatcggcacggcgcgcggcagcgtgtcctccatcgtctcgcgcgcacagtttgaccgcatgcttctccaccgcaacgacggcgcctgccaggccaagggcttctacacctacgacgccttcgtcgccgccgcagccgccttcccgggcttcggcaccaccggcagcgccgacgcccagaagcgcgaggtggccgccttcctagcacagacctcccacgagaccaccggcgggtgggcgactgcaccggacggggccttcgcctggggctactgcttcaagcaggaacgtggcgcctcctccgactactgcaccccgagcgcacaatggccgtgcgcccccgggaagcgctactacggccgcgggccaatccagctctcccacaactacaactatggacctgccggccgggccatcggggtcgatctgctggccaacccggacctggtggccacggacgccactgtgggctttaagacggccatctggttctggatgacggcgcagccgcccaagccatcgagccatgctgtgatcgccggccagtggagcccgtcaggggctgaccgggccgcaggccgggtgcccgggtttggtgtgatcaccaacatcatcaacggcgggatcgagtgcggtcacgggcaggacagccgcgtcgccgatcgaatcgggttttacaagcgctactgtgacatcctcggcgttggctacggcaacaacctcgattgctacagccagagacccttcgcctaattaattagtcatgtattaatcttggccctccataaaatacaataagagcatcgtctcctatctacatgctgtaagatgtaactatggtaaccttttatggggaacataacaaaggcatctcgtatagatgctttgct

SEQ ID NO: 359 - DNA, 978 bp, Oryza sativa
  source 1..978: mol_type = genomic DNA
atgmgngcnytngcngtngtngcnatggtngcnacngcnttyytngcngcngcngtncaygcngarcartgyggnwsncargcnggnggngcngtntgyccnaaytgyytntgytgywsncarttyggntggtgyggnwsnacnwsngaytaytgyggngcnggntgycarwsncartgywsngcngcnggntgyggnggnggnggnccnacnccnccnwsnggnwsnggnggnwsnggngtngcnwsnathgtnwsnmgnwsnytnttygaycaratgytnytncaymgnaaygaygcngcntgyccngcnwsnaayttytayacntaygaygcnttygtngcngcngcnwsngcnttyccnggnttygcngcngcnggnggngaygcngayacnaayaarmgngargtngcngcnttyytngcncaracnwsncaygaracnacnggnggntgggcnacngcnccngayggnccntaygcntggggntaytgyttyaargargaraayggnggngcngcnggnccngaytaytgycarcarwsngcncartggccntgygcngcnggnaaraartaytayggnmgnggnccnathcarytnwsntayaayttyaaytayggnccngcnggncargcnathggngcngayytnytnggngayccngayytngtngcnwsngaygcnacngtnwsnttygayacngcnttytggttytggatgacnccncarwsnccnaarccnwsntgycaygcngtngcnacnggncartggacnccnwsngcngaygaycargcngcnggnmgngtnccnggntayggngtnathacnaayathathaayggnggnytngartgyggncayggngargaygaymgngtngcngaymgnathggnttytayaarmgntaytgygayathytnggngtnwsntaygaygcnaayytngaytgytaywsncarmgnccnttyggnwsn

SEQ ID NO: 360 - DNA, 1098 bp, Brassica juncea
  source 1..1098: mol_type = genomic DNA
aaataaaattcatcaaaataacccatccaaaagagtccaaaataacaaatgacaattccacctttattttaacaaaaattatattcaaactagacaaacatgataattgtgatatagtttctcaacaagtttcaaaaacaattatagttttccaccataattgtaaacacacatattttcgccaaaaccataaaatatatattctcgctaaaacaacaagaaaaacatttgtccgtgaattccatctcttctcataaacttcatcttccatcgtatcaagcgaacccatcctattggggggtatgtgattcatgagccttaattagggtggtacagtcagcgactcctgagcttcagagagggtagtccagcagctagtgactctgctagagatagtgtggcccagctagtgagtagtgactcatgaggtagagagagggtggtccatcatatatcgtgttagacaaattctatatagacaatgaggtaaatgtgggatatgaaggtggtggcaaattttagaacaattagtatttaagtatagtaaacataaaaacaaaccagcactgcttatcttcgattctatcaagcgaacccaccttatattgaattaatttatggtagcagtgattcgtgaacgtcagagagggtggtccctctagtgactcatgagctagagagagggtggtccagctatcgtgtagaaatattctatagaccattagataaacgtgccaaatgaacttggtggtgacaaaatagaagtttagaatgtttgggttcccggtaaaaaggtgaaaccacctttttttttttttttttttaccaacgttgaattggcctaatgataaaagggttacgcttgtaactaccgccacccaggtttaattcacggtgggagagactatttataatgcttaggtttctggcaaagaagtgaaaccactttttttctttccagaaaaaatagaagtctagaaaacataaaaacaagtatataaaattcgatgtgatttaacactaactgattttgtacattgcatgttgctatatatacccttacttgcctcttaaaacaaccatacagctcagagaaac

SEQ ID NO: 361 - protein, 36 aa, Medicago truncatula
AFIQLSKPCISDKECSIVKNYRARCRKGYCVRRRIR

SEQ ID NO: 362 - protein, 40 aa, Fagopyrum esculentum
AQCGAQGGGATCPGGLCCSQWGWCGSTPKYCGAGCQSNCK

SEQ ID NO: 363 - protein, 40 aa, Fagopyrum esculentum
AQCGAQGGGATCPGGLCCSQWGWCGSTPKYCGAGCQSNCR

SEQ ID NO: 364 - protein, 186 aa, Capsicum annuum
MMNANGFSGVEKEYIRKHHLHQPKENQCSSFLVKHIRAPVHLVWSLVRRFDQPQKYKPFVSRCIAQGDLEIGSLREVDVKSGLPATTSTERLELLDDEEHILSFRIIGGDHRLRNYSSIISLHPEVIDGRPGTLVIESFVVDVPQGNTKDETCYFVEALINCNLKSLADVSERLAVQDRTEPIDQV

SEQ ID NO: 365 - protein, 327 aa, Phaseolus vulgaris
MKKNRMMIMICSVGVVWMLLVGGSYGEQCGRQAGGALCPGGNCCSQFGWCGSTTDYCGKDCQSQCGGPSPAPTDLSALISRSTFDQVLKHRNDGACPAKGFYTYDAFIAAAKAYPSFGNTGDTATRKREIAAFLGQTSHETTGGWATAPDGPYAWGYCFVRERNPSAYCSATPQFPCAPGQQYYGRGPIQISWNYNYGQCGRAIGVDLLNKPDLVATDSVISFKSALWFWMTAQSPKPSSHDVITSRWTPSSADVAARRLPGYGTVTNIINGGLECGRGQDSRVQDRIGFFKRYCDLLGVGYGNNLDCYSQTPFGNSLFLSDLVTSQ

SEQ ID NO: 366 - protein, 340 aa, Oryza sativa
MSTPRAAASLAKKAALVALAVLAAALATAARAEQCGAQAGGARCPNCLCCSRWGWCGTTSDFCGDGCQSQCSGCGPTPTPTPPSPSDGVGSIVPRDLFERLLLHRNDGACPARGFYTYEAFLAAAAAFPAFGGTGNTETRKREVAAFLGQTSHETTGGWPTAPDGPFSWGYCFKQEQNPPSDYCQPSPEWPCAPGRKYYGRGPIQLSFNFNYGPAGRAIGVDLLSNPDLVATDATVSFKTALWFWMTPQGNKPSSHDVITGRWAPSPADAAAGRAPGYGVITNIVNGGLECGHGPDDRVANRIGFYQRYCGAFGIGTGGNLDCYNQRPFNSGSSVGLAEQ

SEQ ID NO: 367 - protein, 253 aa, Solanum chilense
MKFNIVSPVALSCLFFLFLTGTLAQNAGSIVTRELFEQMLSFRNNDACPAKGFYTYDAFIAAANSFPGFGTTGDDTARKKEIAAFFGQTSHETKGGSAGTFTGGYCFVRQIDQSDRYYGRGPIQLTHQSNYERAGQGIGVGQDLVNNPDLVATDPIISFRTAIWFWMTAQDNKPSCHNVIIGQWTPSPADTAANRVPGYGVITNIINGGLECNMGPNTAVESRIGFYRRYCGMLNVPTGENLDCNNQKNFAQG

SEQ ID NO: 368 - protein, 326 aa, Oryza sativa
MRALAVVAMVATAFLAAAVHAEQCGSQAGGAVCPNCLCCSQFGWCGSTSDYCGAGCQSQCSAAGCGGGGPTPPSGSGGSGVASIVSRSLFDQMLLHRNDAACPASNFYTYDAFVAAASAFPGFAAAGGDADTNKREVAAFLAQTSHETTGGWATAPDGPYAWGYCFKEENGGAAGPDYCQQSAQWPCAAGKKYYGRGPIQLSYNFNYGPAGQAIGADLLGDPDLVASDATVSFDTAFWFWMTPQSPKPSCHAVATGQWTPSADDQAAGRVPGYGVITNIINGGLECGHGEDDRVADRIGFYKRYCDILGVSYDANLDCYSQRPFGS

SEQ ID NO: 369 - protein, 135 aa, Arabidopsis thaliana
MEGKTVIFSVLVMGLVISQIQVEAQKTCCPSQSTRKEFEDCISEGNLQILCSAESGCRDTYVGYCPSGFPYGSLTNSGDVVNVYCKLGCVSSLCGALTSLQKLDTSGKVNVAVERCTKACSTICTKGSKTAVETV

SEQ ID NO: 370 - protein, 61 aa, Vigna mungo
PNPKVFFDMTIGGQPAGKIVFELFADTTPRTAENFRALTTGEKGVSRGRKPLHYHGSIFHR

SEQ ID NO: 371 - protein, 512 aa, Camptotheca acuminata
MENLYYCLALLLSILFIFRHFFRHSSKLPPSPFALPIIGHLHLIRNSLHQVLECLASQYGPILFLKFGTRSILVVSSPSAVEECLIKNDIIFANRPRSMILDLSSFNYSIFSWAPYGHYWRSLRRLAVVELFTSRSLQTSSNIRKEEIHNLLCHLFKFSKSGTQKLQLKYWFSLLTFNIITRLVAGKRCVRDAVAGTDSGKQILEDLEGKFTSKMPFNMCDFFPILRWFGYKGLEKILITLHKERDEFMQGLIDEVRRKRTCSANINSVTNRAKTTLIEALLSLQESEPDFFSDTIIKSIISDMFFAGPETSTITLEWAMSLLLNHPEVLGKLRAEIDDHVGHGRLLDDSDLGKLPYLRCIINETLRLYPPTPLLLPHCSSEDCIVGGYEIPQGTILWVNAWAMHRDPKLWEEPTKFKPERFEGMEGRERYKFMPFGIGRRACPGASMAIRTVSLALGALIQCFEWENVGPDKREMSQGRLTLPKAESLEAVSIPRPSAVKVLSQLEGTCFR

SEQ ID NO: 372 - protein, 105 aa, Nicotiana alata
MARSLCFMAFAILAMMLFVAYEVQARECKTESNTFPGICITKPPCRKACISEKFTDGHCSKILRRCLCTKPCVFDEKMTKTGAEILAEEAKTLAAALLEEEIMDN

SEQ ID NO: 373 - protein, 266 aa, Triticum kiharae
MGVKGGGVLWCLLLAGLLLLAVACAAERDTEKEKEEEIRWCEEDCDWKAGQDTGKARECKEQCERRRHGHELLQEDGDSFDSCVSKCRGHGGWWGKERWERCRQICRQSQEGEGGDEGDNTDDRCERMCQHYHDRREKKQCMKGCRYGESDLLSSDDGHEHGDRCQTQCKRLRPGSYDRQQCIEKCQCQQKEDEEVMNHHGGGGHGHGGSSCEQKCQQRYRHEYDKQQCVRDCKSGGGGGAGGRGREGDERQHGREMVIEAILEEV

SEQ ID NO: 374 - protein, 320 aa, Euonymus europaeus
MKYLWVFIVFSIAVLSHACSAQQCGRQAGNRRCANNLCCSQYGYCGRTNEYCCTSQGCQSQCRRCGVRTVGEIVVGDIGGIISKGMFNNILKHRDDDACEGKGFYTYEAFVAAARSFPAFGSTGDDATRKREIAAFLAQTSHETSAGWPSAPDGPYAWGYCFVRERNPPSKYCDTTTPCPKSYYGRGPIQLTWNYNYEQAGRAIGADLLNNPDLVATDAVISFKTAIWFWMTAQSSKPSCHDVITGSWRPSASDNSVCHVPDYAVVTNIISGEIEYGKSRNPQVEDRIEFFKRYCQILGVSPGKCYEERTFVSGLMMETI

SEQ ID NO: 375 - protein, 305 aa, Euonymus europaeus
MKYLWVFIVFSIAVLSLACSAQQCGRQAGNRRCPNNLCCSQFGYCGRTNEYCCTGFGCQSNCRRCGVRTVGEDVVGDIGGIISKGMFNNILKHRDDDACEGKGFYTYEAFVAAARSFPAFGSTGDDTTRKREIAAFLAQTSHETSGGRPSAPDGPYAWGYCFVKERNPPSKYCDTITPCPKSYYGRGPLQLTWNYNYAQAGRAIGVDLLNNPDLVATDAVTSFKTAIWFWMTAHSSKPSCHDVITGSWRPSASDNSVRHVPDYAVVTNIINGEIEYGKSRNPQVEDRIEFFKRYCQILGVSPGKF

SEQ ID NO: 376 - protein, 38 aa, Taraxacum officinale
VAKCTEESGGKYFVFCCYKPTRICYMNEQKCESTCIGK

SEQ ID NO: 377 - protein, 44 aa, Taraxacum officinale
GGKCTVDWGGQGGGRRLPSPLFCCYKPTRICYLNQETCETETCP

SEQ ID NO: 378 - protein, 42 aa, Taraxacum officinale
ANKCIIDCMKVKTTCGDECKGAGFKTGGCALPPDIMKCCHNC

SEQ ID NO: 379 - protein, 49 aa, Triticum kiharae
RTCQSQSHKFKGACFSDTNCDSVCRTENFPRGQCNQHHVERKCYCERDC

SEQ ID NO: 380 - protein, 47 aa, Echinochloa crus-galli
RECQSQSHRYKGACVHDTNCASVCQTEGFSGGKCVGFRGRCFCTKHC

SEQ ID NO: 381 - protein, 47 aa, Echinochloa crus-galli
RECQSQSHRYKGACVHDTNCASVCQTEGFSGGKCVGFRGRCFCTKAC

SEQ ID NO: 382 - protein, 30 aa, Amaranthus caudatus
AGECVQGRCPSGMCCSQFGYCGRGPKYCGR

SEQ ID NO: 383 - DNA, 3666 bp, Oryza sativa
  source 1..3666: mol_type = genomic DNA
atggaggccacggcagtgagcattggcaggtccgtgctgaagggagcgcttggctttgccaattccaccttggtggaggaggtttccctgcagctcggcgtccagcgcgaccaggcgttcatcagggacgagctggagatgatgaactccttcctgatggccgccaatgatgagaaagatgacaacaaggtggtaaggaccttggtgaagcaggtccgcgacgtggcctacgacgtcgaggactgcctccaggacttcgccgtccgcttggggaggaagagttcatcctggtggctcagccctcacacgctgtgggagcggcgccgcatcgccaagcagatggaggagctgaggggcaaggttgaggatgtgagccagaggaacatgcgttaccaactcatcaagggctccaagcctaccgtagctaccaatgtcgcacccagcagcactgcccgtgcgaccatgtctggcgcgcatgaagaacgatggcagcatgagaaggcaatagatcatctggttcggctggtcaaaaccaaagtcgatgaacgtagagtgatcgcggtgtggggaacaagtggtgatatcagggaaatgtccatcgttggaggggcctatgatcatctcaagagaagcaacaagtttgagtgctgtgcctgggtaaatttgatgcatccactgaacccaacaaagctcctgcaaaccattgttaggcaattctatgtaagatctcttcaggaggctggcaaagcaactccgtcgtgtcaaattctgagtagcatgttgataaaggaagatcagggtttggggtttagggttctgaggagcatgctgatgaaggaagatcatttgaatgatgagttcaataaatatttgagtgacaagtgctacctcattgtgcttaatgacctatcgtccgctgaagagtggaagcaaattaaaatgctcttcccagacaacaagaaaggaagccgaatcatagtgttcacacaacaagttgaagttgcaagcttttgcgctaggacagaggaggtggcacccgagcacatgcagttgtttgctgatcagactctttatgcttttcactgcaagggtgctaaagatggagtagattcaatggaggactcatctaacttaaacgaagacactacatacaacgctgtagaaggaaagagccttactcgcacatattcaatggtaactgctttcaaggaatctgagatcgttgggcgagttgatgaaataaaggagattattgaactgatttcaaaaggtagcaaccaacttgagaagatctcagtgtggggaatgggtggtattgggaaaaccactctaattcaaaatgtctaccgaagcgaaaaggttaagaagatgtttgataagcatgcatgtgtcacgatcatgcgcccgttcaatcttaatgatcttcttatgatcttagttaggcaactagaagattcaaaaacttctggaggaaaggagttggttagcattttacaaggaaagaaatacttgattgttcttgatgatgtattattcacaacagaatgggatgctatagaatcatatttcccagcaacggaaacaggaagccggatcataataaccacaaggcatgaaagtattgctaagcattgttcaggggatcaacaaggaaaaatgtatcaactcaatcgtctaggagacaacgatgcaaagaacctctttgcaaagaaggtatttaaggagtcagtaaatttggatcaacaagatcttgaattgatcaaagaagcgaaaccgattctaaagaagtgcaatggacttcccctcgcaattgtcaccataggtggtttcttggcaagcagccccaaaactgctttggagtggagaaaattgaatgagcatattagtgcagagttggagacaaacccagggcttgaggccatcagagctgtccttaatataagctacgatggattaccttatcacctcaagtcttgcttcttgtatctgtccatctttcctgaagatgacaagattagccgggaacgtttggtgcgccgatggtgtgcagagggttactcaagggagctatgggacaaatctgcagaggaaatagcaaacaactacttctttgaactcatagacagaagcatgatcctaccaactcaaaaattaacttacaacaatagacctgattcttgccaggtccacgatatcatgcgcgagatagccatctcgaagtcaaaggaggaaaatcttgttcttagactcgaagggggtcataggctacacaatcatggcatagttcgacatctttccattacaaacagcggcgaggatcgggagacagattttgctgaattggagacaacagtagacatgtcccgaataagatcattaacagtgtttggggagtggaagccatttttcatttctgacaagatgaggttgttgcgtgtgctcgacttggaagacacagaaggtgtacgtaatcaccatattaagcaaattgggaagctccttcaccttagatacctttctctaaaacgatgtagggagattgcttacctgcctgattccttaggtaacctaaggcaactggagatactagatatcagaggtacgctcatagtcaggctgccaaagaccatcatcaatcttcgcaagctaaagtatctccgtgctgttccaaacatagacgacatagcagagattctaattctaccagagctcatgaggaacaggctatgcatttctactgtttcgttgctggggctttgtctgctatgctcagcaagtgcgattggtaagtttgatgaagagactagtacccgtgacctctgcaccatgtggtgctgcagtattctccctagcattgctatgcgcctccaagggaatggtgtagtagcaccaagagggctgaggatcaggagactgacagccctgcacacgctaggtgtggtggacatttcatggcagccatcaattttacaagatatcaagaggctcatccagctgcgcaaattggaagtgaccggtgtcaacaagaaaaatagcaaaaagcttttctctgcccttgccgctctcagccaactagaatcattgtcactgttctcgaagtggaagccaggtctctggggctgtctggatgctgaagaaaagttttcgccacctaagaatctcaagactctgaagcttcaaggcaacctggttgagctgccaaaatggatcgggaagctcaacaatcttgttaagctgaagctatcaaaatccaggctcaaggatcatgatgctgctatacaagtccttggtatgctaccaaacctgaccatcctatgcctgccgcgcaagtcatttcactcgcttgagggtggtgaactcaatttctcggagggatctttcaaaagcctggtggttctcgagctccacttcggtgggagcaaacgcgtcaagtttcaacaaggagcattccacaatcttgagctactggagctttcaggttacattgataaagtcgaaactaagttctctgggctagaatttctcccaggaatcaaggaagtctggctccagggtgaattttattccagaaacgagcaagccgcacgaagattgaaagaggacttgctggcacagctttctgagaatccaaagaaaccaatcctgaagactagcgggtatttttag

SEQ ID NO: 384 - DNA, 9576 bp, Oryza sativa
  source 1..9576: mol_type = genomic DNA
ggaaatactagaatgacttacattgtaaaacagagaaagtatgattatctaaactctcagatagtctattgtaatcattgtatgcatgacatcagcttgtgtcaaagctgcagctttgttggatcaaccagaatttactagttctaaaaaaaacagaatttacttagatcctgctgaaagacttcgggccaattagaagcccagtatttggcccaaaactggtgtaaactacaggcccataatagaaataagttcactggaggtcccccaacttaacaccgagatttttttgaggtcccttaaccataaaccagaaatgcgtacccctaaactatgtaaaaccgtcaaaaaaaaaaaggtcccgaggcagtatagttgctcggtttcgctgacgtggcatcctagtcagcaaaaaaaattaaaataaatatgtggggcccacatgtaagtgagagaaaatggtgtgggccccacatttctcctttcttttctttttctcttctcttctctcccgattttctcgagtgggcgcggcggcagaggggagagaggtgaccggcggtggagcgggggtggtgggagaggggggctggcgcgacgtcggcggcgggagaaaaggagaggaggcggctggcgcgacggcgagctcggacggcaacggcgggaggaggaggaggagaggaggcagtcggcgctgtaaaacgcgcatgggatgcggcggatgatgtcgagcgggacggtgtcctcatcaccatcttcctcatcgtcatcgcagtctgcgggtgccgggcggagcggtttgggagggagggggaggcggccagcgagcccgttcgagctcgcccggcctgcgcgcgagctcgcccctcccatagcttggtgtgctggggacgacgacgaggaaagggggagaaaggaattgacggccgatgatagcaatggcgggcgagcgcggcgccgggctgctcatgctcgccgaccaggcccccggcttcgccgcactcgtccgccgtgctcgcccacgcactcgccgacctccgctccacccgccgctcctgcccgctgcccgctgcccgccggcctccctgactgaagaagagaagagagaaattaaagagaagagaaggagaagaaaagagaagagaagaaaaaaagatgtgtagctgacatgtgggccccatgtacttttttattttttttgctgactagaatgccacgtcagcgaaaccacccatatatactgtcataggaccttgagtgcatagtttgtgtgagtttagggatacacatttctcgttttgtagttaagggacctcgtaaaaatctcgctgttaagttgagagacccctccggtgaacttattcccccaaatattttctccatgctctgggctcaaacgcactcttggatgggccgtgtaatctacaccatttctggcccaatccaacgaaggtagctccagactcctaactccgccgccgcatgcccaatcctcgccggccgccgctgccatctcccttcccccaccgccaccgtcgccttctccgttcccccaacaaaggctcagtagcagcagccgcggcgcggagagcagaggccttggagggcctgcagaggagcgcccgcgtcgacgaagacgacatcagcaggcagtggacatggcgactgcgaatgctatcgccgacgtgggagcttcaggcgaggatgcgtggccttcatcagctgctgctcccttacctgctctggtttgtcattgtgttggttcgtggtttggggatatcaggatggggaaggggaatgggtttcgtgccatgttgttctattgtgcaatttgatgttctcttgtcgaatttcatggtgattcaatctgcatctgtgttattggttgtcaagcaaacattttatttctttcgagatgggtgtttcatctgaaattggtgtgtctgatgatgtgaccttgtgcaaatcattgtttcattttcttctattccacagagatttttttgtttagagtttattctaccatcttcttaccttttgaatgctatgcaccacagatttctgatttttacacattcaatcacagtgccgacccttggcgaatttaaaattttctcaccgtcaaaatttaatcaaacatctgatctaacagtagtagcgccagcacggctggtatttaaggcagaaagaaaggttgcgagggcgaggagttggtgatgatctgccggtcgtgtcgtgactttaggctataaaagatagctgtttggattaacccaaccaatgaagcgaatcatcgatggccgatagcgagattatatccaactaatgaagagaatcaactttaatcttttgtgagctacaagtttcgtggtgaaggcatatactaataccaccatcatggctgcagcgaatcaacgagatgcatttgtcttgcacatttcccaccggatactttgccatccatggctttatctcctccatgattgtatccccttcttcctcaacaaggaacgatcgatcattgtttgcttctttctctgacgacactttggtgcaagtgaaaggctctttcctggaactcgtcccgtgagctccttcctggctacatcctccttaattccttgccgatttccggcttcgtcttcactatcgtcagttcatttctcccgctctgcctgagagtccagtttcttggagatagtcgccggcttgctctctctctctctctcccttctcatcgccagctccagctcacaatccgagcttacgtggtggaatcgctatcgccacctctcggaagattattgtactttgccttgcctacttcttgagtccgatcaaacacatccatcatgcatctgtttgtacttgcattcagccaaacacttccagtttaactccgtccgcaagtcaatacttgcattcaatttccatttcctacaaaagcagctgctcagactcttgccttctccacccagcaatcgtgtttccttccctgtatcctgcgcgtgtgttcttagctgctctaggggatccttccaatggcggagctaatggccaccatggtggtcgggccactgctgtccatggtgaaggacaaggcctccagctacctcctggagcagtacaaggtgatggagggcatggaggagcagcacgagatcctcaaacgcaagctgccagccatcctcgacgtcatcgccgacgccgaggagcaggcggctaaacacagggaaggggtgaaagcatggctcgaggcgctccggaaggtggcctaccaggccaatgacgtcttcgacgagttcaagtacgaggcactccgccgcaaggccaaggggcactacaagatgctcagcagcatggttgtaatcaagctcattcctactcacaaccgtattctgttcagttataggatgggcaacaagctcaggatgattctgaatgccattgaagttctaattgaagagatgaatgcctttaggtttaaattccgaccagagccaccaatgtcgtccatgaaatggaggaagacagattctaaaatctccgacctttctttggacattgccaacaactcaagaaaggaagataaacaggagattgtcagcagattgcttgttccagccagcgaaggggatctcactgttcttcccattgtaggaatgggggggatgggcaagaccaccttagcgcagctcatttacaatgaccctgacattcagaagcatttccagttgctgctctgggtgtgtgtttccgacaacttcgatgtggatttgctggctaaaagcatagttgaagcagctcgcaaacagaagaatgataacagtggaagtactaacaagtcaccattggatgaacttaaagaagttgtgagtgggcagaggtacctcctcgttttggatgatgtctggaaccgtgatgctcgtaagtgggaagcgctcaagtcctaccttcagcacggtggcagcggtagctcagttttgacaacaactcgtgatcaagaagtggctcaagtgatggctccagctcaaaaaccttatgatctcaagagactgaaggaaagcttcatagaggaaattatcaggacaagtgctttcagttcacaacaagaaaggcctcctgagcttctcaaaatggttggtgatattgccaagaaatgttctggttcccctttagctgcaacagcattgggctctacactgcgtacgaagaccaccaagaaagaatgggaggctatattaagcagaagcacaatttgcgatgaggaaaatggaattttaccaatactcaagctcagttacaattgcttgccatcatatatgcggcaatgcttttccttttgtgcaattttccccaaggatcatgagattgacgtggaaatgctgatccagttatggatggccaatggttttatcccagagcaacaaggagagtgccctgaaatcattggtaaaagaattttcagtgagttggtgtcaaggtcattttttcaggatgcgaaagggatcccgtttgagttccatgatataaagaactctaagattacttgtaagatccatgaccttatgcatgatgttgcacaatcctccatgggaaaagaatgcgctgctatagatacagaagttagtaaaagtgaggattttccttattctgctcgccatctatttttgtcaggtgatagaccagaagctattcggactccttccccagagaaaggatatccaggtatccaaacattaatatgttcacgtttcaaatatttgcagaatgtatcaaaatacaggtcattgcgagtattaacaacgatgtgggaaggttcattcctgataccaaaatatcatcatcacctgaggtatcttgatctctcagaaagtgaaattaaagcacttcctgaagacataagcatcctatatcatttgcaaacattgaacctttcccgttgtttatctctccgtcgacttccaaagggaatgaagtacatgaccgccctccgtcacttgtacactcacggatgttggagtttaggaagcatgcctcctgacctcggacacctcacttgcctacagacgcttacatgctttgtagccggtacttgctctggctgcagtgatttgggagagctgcggcagttggaccttggtggtcgactagagctaagaaaactggaaaatgtgacaaaagctgatgcaaaagcagcaaatctcggaaagaaggaaaaactgaccaaattgaccttaatatggactgatcaggagtacaaggaggcacagagtaataatcataaagaggtgctggaaggtctcacgcctcacgaggggctcaaggttctgagtatatatcactgtgggagcagtacatgtccaacttggatgaataaactgcgggacatggtggggcttgagttaaatggttgcaaaaatctcgagaagcttcctccgttgtggcagctaccggctctacaagttctttgcctggaaggactgggtagtttaaattgcttgttcaactgtgacacacacacacccttcacattttgcagactgaaggagctaaccttgtctgatatgacaaattttgagacatggtgggacacaaatgaggtacaaggagaagagctgatgtttcctgaggttgaaaagctgtcaatcgaaagttgccataggctaactgccttgccaaaagcatcaaatgcgatttcagaatcgtccggcgaagttagcaccgtgtgtcgttctgcatttccagcattgaaggaaatgaaattatatgatttgcgtatctttcagaaatgggaggcagtcgatggaactccaagggaggaggcaacatttcctcagcttgacaaattagaaatcagacagtgcccagagctgactactctacctgaagcaccaaagctaagtgacttagagatatctaaaggcaatcaacaaatatccctacaggcagccagcagacatattacttcattgtccagtctcgttctgcatttgtccactgatgacacagaaacagcatcggtggccaagcaacaagattcgagtgatttggtgattgaggatgagaaatggagtcataaatctcccctggaacttatggtcttgagtcggtgcaaccttttattctctcacccaagtgcactggctctgtggacatgttttgctcagctcctagatctgaaaattcggtatgttgatgcgcttgtcagctggccagaagaggtgttccagggcttagtttccttgaggaagttagagatttctgtatgcgagaatctgacaggacacacacaagctcgtgggcaatctacacccgcaccaagtgaactcctgccacgtttggagtccctagagataacgtgttgtgattctattgtggaggtccccaatctaccggcgtctctcaagctattagaaattagggggtgccccggcctggagtccatcgtattcaatcagcagcaggataggacgatgttggtgagtgcagaaagctttgcagagcaggataagtcatcgttaatatcagggtccacaagcgagaccaacgatcacgtccttccacgcctagaatctcttgtaataaattggtgcgatcgtttggaggttctccatcttcctccgtccatcaagaaattgggtatttatagctgtgaaaaacttcggtccctctcagtaaagctggatgccgttcgagaattaagtatcagacattgcgggagcttgaaatcactggaatcttgcttaggagagctcgcgtcgctgcaacaactcaaactttttgattgcaagagcctggaatccttgccgaaggggcctcaagcatactcatctcttacatctcttgaaattcgtggttgttctggtataaaggtgcttccaccgagcctacagcaacgtctggatgacatcgaggacaaagaactagatgcctgctatgaaggtaatcttcagtttcttaaccgtgtaccatttagtggtaaaagtttcgagtttcgtgtctagaacccctagtcaaccattaatatgattatatgtacatagagtacaatgcgcattcataactcacttctgcagctgtgtcatctaaaccctttaaactttgagttgcatttgggtatctaatcgcatgcaaaggaatttagttatatctcccgtagccattccttatatgtgatgatctcttcctgtgattatgcttgctagtttggactatgtaattaattttgccgggtgactatgtaattacatgacttcatttagtcgccaggtgtggcatcatgcaattattatggcaaagctgtattagtcatgatcgaagccacttggtgaacttattccctgctactttgaaccaatactcattgattatttccctttaagcgtttgatatggacgacagtttaaatttgcagagctaactaacgcagcgcttgtctttacatttctctggaaactcacagctccattgcatatgtagtttgagtatacatagtttctttgaactgtcttatgcctttgaaaagcttgactatggaattctagtctatatattcaatacatatatttttttttcttttgtttgccagaggcagaagcagaaccaaagtctcgtcatcgtcaatctgcaatcagtaggctgatgtgcttgaagtagcagtttcaggaccagatgagagttgtcatcatggtttgtaacgcgtgcttgatgattgatttcgaatgaaattctagccactatccttatgcttactctctctatggtgtgacttccttgtaggatcgttaccgaatctgcaattgttgggttattaattgtgtggttgtatctcatggtagaatgtattacctacctaccctttctcaagataaactccagtaaagtcgatcgtctggttggtgtgagctgctacaagaaggatgaagccgatgatcccaaggccttgactttaagctagtcccaggttgtaagctgaagaacaacatactggagcttaaactgcttcactctttttttatccttttccttttcttgtgaactgtgatgtgtttgatctcgttcatgctccatcataagagaatcacagctagcacttccatttcaatgatgtttttcctaacatgacatgactgcagaggatacttgtgattgatcaacaacattttgcagcaacgttctctcccgataacgctgcaatggaattgatcaattggtgttcctacttattggaatgaatttcccattgtggaataaaatggaaagattggtacaatctgctgaaaaatgaactgtcgttactcaagttgaaacatgtgtcatgtgtgtaactatcagaattgttctcgacaaaatcgttgggacttgcaaggtaaaaaaaaaaaattcctcagctctgtaaatgctattgctgaactaaagttcagaaagctatagtgccgaaagatctcagatggcctactgcaacaaaattcagtacaaatgcaaaacaatgtaacattacgtggcccagcccatcatggtaagcccatactgtatgcgctgcaaactaatattagttcaggcaattactctgaaatttctgatagacgaacctgattttttcatgtcaggtgccgtgcttgttcagattcagcaacttacatttccaaagaagaaaaaggaaattcataccttctctttatttggtttttaaaagtggcctggattttcattatttggttaaaatttggcctttgtcgtaaggatttggatcctctatccaaacacatgccttccaagataaacgaatccctcattatacaaaaaaaaaagcacaagatgctcaacaagaagcttcaaattcgtgtaaatacatgtcatgtctcgctaccaaacaatatctcaacaatgacaacagattggaggtattcatctcacaatgatacatttcaacacaaatttatgtaggcctcgctgacaggacttggctggatggctgtcagttcagttcttgaaccaactgaagcatgagcagccctgcaaggaagcgataaactgaattaaaataggaatttgttacacaatacctgtaaagtggattacattaaaatattaccaaatcatactgtaagcaatcatacagtacaagattccttgcaaacaaccctaaccaaacttctagtaaaaccattattttttctgtagtaccaactttttgcaaccactatatactccagtaaaaaccagaagtattgttgcaatgactttgccgataaattatagaacgcggctactcgaagcagtagatttaagacaatttttactgcataataactacgcatggtgtcaagatccctaaaaattaacagaggcagacccagctcaagtattgacaaactcaagtggcaactggcatatgaacaattttctcgttcaaatatatctgaagcaatgtgtaaaacaaattagttttgctccacacatctgacaataatttttttcagtaagcagacttactgtggattcatatttgcgttgttgatagcgtttgatataatctgcctcgctagtcatgacgggagcgttgccggtacc

SEQ ID NO: 385 - DNA, 3720 bp, Arabidopsis thaliana
  source 1..3720: mol_type = genomic DNA
atggattcttcatgtttcttggtttatagaatattcagatttcgtaaaagaaataagaatatttcttcttctctatcttcttcatctcccccttcttctttgtctcaaaattggttgcaccctgttttcttgagcttccgtggggaagatgtccgcaaaggcttgctcagtcacattcagaaggagtttcaaagaaacggaatcacaccgttcattgataatgagatgaagagaggaggatccattggtcctgagctcttacaggctattagaggatctaagatcgcgatcatcttgctttcgaggaactatggttcttcgaagtggtgtcttgatgaattggtggagattatgaaatgcagagaagagttgggtcaaacagtgatgaccgttttttatgatgtggatccatctgatgtgaggaagcagaagggagattttgggaaggtttttaaaaaaacttgtgttggaagaccagaggagatggtacagagatggaagcaagctttgaccagcgctgcaaatatactcggggaggattctcgcaactgggaaaacgaagcggatatgatcattaaaatctcaaaagatgtctccgatgtgttgagttttacgccatcaaaggattttgatgagtttgttggcattgaagctcatacgacggagataacttcgttgttacaacttgatctggaagaagtgagaatgatagggatttggggtcctgctggtattggcaagacgaccatctccagagttctatataacaaactctttcatcagttccaactgggcgcaatcattgacaacatcaaagtacgttatccaagaccttgtcacgatgagtacagtgcaaagctgcagttacagaaagaattgttgtctcagatgattaaccagaaagatatggtggttcctcatttaggtgttgcccaagagaggttgaaggacaagaaagttcttctagttcttgatgacgtcgatgggttagtacaacttgatgccatggcgaaagatgtacaatggtttggccttggaagtcgcattattgtcgtaactcaagatctaaaacttttaaaagctcatgggatcaagtatatttacaaagttgattttccaacttctgatgaggctcttgaaatcttctgcatgtatgcttttggtgagaagtcccctaaagttggttttgagcagattgctcggacggttacaacacttgctggtaaactcccgttaggactaagggttatgggatcatatttacggcgaatgtcgaagcaggagtgggcgaaatcaataccaaggctaaggaccagccttgacgatgatattgagagcgttttgaagttcagttacaactccttagctgaacaagagaaagatttatttcttcacataacctgttttttcagaagggaaaggattgagacattggaagtatttcttgcaaagaagtctgtagatatgaggcaagggctccaaatcttggcagataaatctctcttatctttgaacttgggaaatatagagatgcataatttgctagtacaactaggcctagacattgttcgtaagcaatctattcataagcctgggaaacgtcagttcttggttgatactgaagatatttgtgaagtactcactgatgatacgggtaccagaactcttataggcatagatcttgagttatctggtgtaatcgagggcgtaataaatattagtgaaagagcctttgaaagaatgtgcaatctccagttcttaagattccaccatccatatggtgatcgttgtcacgacatattgtacttaccgcaaggtttgagccatatatctcgaaaacttagactacttcattgggaacgttatccactgacatgtttgcctcccaagtttaatccggagttccttgtcaaaataaacatgcgagacagcatgctcgagaagctgtgggacggaaatgaacccattagaaacctcaaatggatggatttgagtttttgtgtaaacctgaaggagcttcctgatttctctactgccactaatctccaagaattgagactcataaattgtttaagcttggtggagcttccctcttccattgggaatgccactaatttactggaattggatcttattgattgctcaagtctggtgaaactcccctcctctattgggaatctcacaaatctaaaaaagttgtttctcaatagatgttcgagtttggtgaaactcccttcctcttttgggaatgtcactagtctcaaggagttaaatctcagtggttgttcaagtcttctggagatcccctcttccatcgggaatattgttaacctcaagaaagtatatgctgatggatgttcaagtctggtgcaactcccttcctctattggaaataacactaatctcaaggaattgcatctactgaattgctcgagtttgatggaatgcccttcttctatgttaaatttaactcgtctcgaagatttgaatctcagtggatgcttaagtctggtgaagctcccctctattgggaatgttattaatctccaatcattgtatctcagtgattgctcaagtctaatggaactccccttcactattgagaatgccactaatctcgatacattgtatcttgatggatgctcgaatctactggagcttccctcatctatttggaatatcactaatctccaatcattgtatctaaacggatgctcaagtctaaaggagctcccttccttggttgagaatgccattaatcttcaaagtttgtctcttatgaaatgttcaagtttggtagagctcccttcctccatctggagaatcagtaatctctcatacttagatgtcagtaactgctctagtttgctagagctcaatcttgtctcgcaccccgtggttccagattccctaatcctagatgcaggagattgtgagtctctggtgcagagactagattgcttctttcaaaatccaaagattgttctcaacttcgctaactgcttcaaactgaatcaagaagcaagagatctcatcatccagacatcggcttgtagaaatgcgatattaccaggtgaaaaagtgcctgcatacttcacgtaccgcgctactggtgattctttaacagtgaagttgaaccagaagtatcttcttcaatctttgagatttaaagcttgccttttgctagttgagggtcaaaacaaatggccaaattgggggatgaatctagtaacttctcgagaaccagatggacacattgttctgtacacaccaagcagccatcttcaaggtccacttttaatggagaatctgtatacattcgaatttgaactagtggtgacttccagtgagttcgttttggagttcagagctgatcgttacaagtgtgcggtaagcgaatgcggcctaatccaactcttttaaatccctttatgtccatgagcttcagaggtcagtggaggctgttattttgcagtctttgagatttgagacaaacactagactgaagttagggcatgacaagagctgaaatacattaatgctatatgatgaaacattttcttttaaagttgggtcgatttgacaagtttggtgtgcatgttgtgtggtgtcacttagtatgattatcattactatatatgtgatgttggtaatatgtataatttatcaattaagtcacagtatacatctatgtgtttatatgtagatattacagcgaag

SEQ ID NO: 386 - DNA, 2845 bp, Arabidopsis thaliana
  source 1..2845: mol_type = genomic DNA
caaagacttttgaatgtctcccaccaaattctgatgaatgaatatgtggatgtggtatttcatggaccagcacaaaagagcatttcaagaagtcgtttggtagctgtaccatctaattatgttcacatgatgctgagagttgaataattcagaaagggacaaagagtgttatgattgcgttgacttggagtcatgtttcatgaaggtagtgcgtagttgactcttttctagtgtaggaggtagagatttgggagagtcactagaacacgaaatggcagaggctattgtttctgttacagtgcagaagctaggacagttgctcttggaagaaccgttgttcttatttggtataggtgaccaagtgaagcagctgcaagacgaattgaagcgtttgaattgctttttgaaagatgcagatgagaagcagcatgaaagcgagagagtgcgtaactgggttgcaggcattagagaagcttcttatgatgcagaggatatcctcgaggcatttttcctcaaagcagaatcaaggaaacaaaaagggatgaaaagggtgcttaggaggcttgcttgcatcttgaacgaagcggtttcacttcatagtgttggctcagagattagagagatcacctccaggctttctaagatagcagcaagcatgctagattttggtataaaagaatctatgggcagagaaggtttgagtttgtctgatagtctaagagaacagaggcaatcgtttccatatgttgttgagcataatcttgttgggttagagcagagtctagagaagttggtgaatgatttagtttccggaggtgagaaactaagagtcacgtccatctgcggaatgggtggtttggggaaaacaactttagccaaacagattttccatcaccataaagtgaggcgtcatttcgatagatttgcttgggtatatgtttctcaagactgtagacggagacatgtttggcaagacatttttctgaatctcagctacaaggatgaaaatcagagaatactcagcttgagggatgaacaacttggagaggagttgcatcggttcttgaaaaggaataaatgcctcattgtgcttgatgatatctggggcaaagatgcttgggattgtctgaaacacgtctttccacatgaaacaggaagcgaaataatcctcactactcggaacaaggaagtcgctttatatgctgatcccaggggtgtgcttcatgagccacaattgctaacatgtgaagagagttgggagctgttggagaaaatttcattatctggaagagaaaatatagagccaatgttggtcaagaaaatggaggagattgggaagcagatagttgtaaggtgtggaggtttacctctagctataacagttcttggaggacttctggcaacgaaaagtacatggaacgagtggcaaagagtatgcgagaacatcaaatcatatgtttcaaatggaggtagtagcaatggaagtaagaacatgctagttgcagatgttttgtgcttgagttacgagtacttgcctccccatgtaaagcaatgtttcctctactttgctcattatcctgaagactatgaggttcatgtgggaacactagttagttattgcatcgcagagggaatggttatgcctgtaaaacacacagaggctggcacgacagtggaagatgtcgggcaagattatcttgaggaattagtaaagagaagcatggttatggttgggaggagggacattgtaacttcggaagtcatgacatgccgtatgcatgacctcatgagggaggtgtgtttacagaaggcaaagcaagaaagctttgtgcaagttattgattcaagggatcaagatgaagctgaggcttttatatctctttcgaccaatacatctcgtagaatttctgtccaactacatggtggagcagaggagcaccatatcaagagtctgtcgcaggtttccttcagaaagatgaaacttcttcgagttctagatcttgagggagctcaaatcgagggagggaagttgccagacgatgtaggagatctcatccatttgaggaacctgagcgtgagattgacaaacgtgaaggaacttacatcatctattggaaacttaaagttgatgattactctagacttgttcgtgaaagggcaactgtatattccaaaccaactctgggattttcctgttggaaagtgcaatccaagggatcttttagcaatgacaagtcttagaagattgtctatcaatctttcttcgcagaacacagacttcgtggtggtgtcttcactaagtaaagtcttgaaacgtctccgtggcttgacaataaacgttccatgcgaacctatgcttccaccagtagatgtaacacagttggtctctgcatttactaatctctgtgaactggaactgttccttaaactagaaaaactcccaggagaacagagtttctcctctgatcttggtgctctacgtttgtggcaatgcggattagtggatgacccgtttatggttctcgagaagcttccaaacttgaagattctccaactgtttgaaggatcatttgtaggtagtaagctttgttgttccaagaatctagagaatctagaggagtggactgtagaagacggtgccatgatgcgtcttgtcaccgtggagctaaagtgttgtaacaaactgaagtcagttcctgaaggaacgagattcctaaaaaatctacaagaagtagagattgggaacaggacaaaggcatttaaggacaagctaatctctggtggtgaagatttctacaaggttcaacatgtgccttgtgttgtttttgagaactgtgaactttaa

SEQ ID NO: 387 - DNA, 3152 bp, Arabidopsis thaliana
  source 1..3152: mol_type = genomic DNA
agcttttttgtttgtctattagagattagtcaacgtagtgatgacatactgacatctttggattgtttcaaagtttacgtttttactatacattgactagtcttagagattttatattatgcatatagtgacatagacttttcctttcttatctattcctcttctctacctaatctgtgaatctctctctctcactctctctcttttccttgattgtgcagagatgggaggttgtttctctgtttcattgccatgtgatcaagtagtgagtcagttctctcagttgttatgtgtcaggggaagttatattcacaatctctccaagaatctggcttctctgcagaaggccatgcgaatgctcaaggctcggcaatatgatgtgataagaaggttggaaacagaagagtttacagggcgtcaacaaaggctttcccaagttcaggtatggcttactagtgtcctaatcattcaaaaccagtttaatgatctgcttcgtagtaatgaagttgagcttcaaaggttgtgtctttgtggtttctgctccaaagatttgaaattgagctatcgttatgggaaaagagttatcatgatgttgaaggaagttgagagtctcagttctcaaggattctttgatgtggtttctgaggcaactccgtttgctgatgtggatgagatcccttttcaacccacaattgttggtcaggagataatgcttgaaaaggcatggaaccgtctcatggaagatggatccgggattttgggtctgtacggtatggggggagtaggcaaaacgacactactcacgaagatcaacaataagttttctaaaatagatgacagatttgatgttgtgatatgggttgttgtgtctagaagttcaacagtccgtaagatacaaagagacatagcagaaaaggtaggccttgggggaatggagtggagcgagaaaaacgataaccagatagccgttgacatccacaatgtccttaggagacgaaagtttgttttattgttggatgacatatgggagaaagtgaatttaaaagcggttggagtcccgtatccaagcaaagataacggatgcaaggtagcattcactactcgttctcgagatgtgtgtgggcgcatgggggttgatgatccgatggaagttagctgtctacaacccgaagaatcttgggatttgtttcaaatgaaggttgggaaaaatacactgggaagtcacccagacattcccggacttgctagaaaagtcgctaggaaatgtcgtggcctaccattagcactcaatgttatcggtgaagctatggcatgcaaaagaacagtacatgaatggtgtcatgccattgacgttttaacatcatctgccatagatttttcaggtatggaagatgaaattctccatgttttgaagtatagctatgataatttaaatggggagctgatgaaatcctgcttcctctattgctctctgtttcctgaagactatcttattgataaagaggggttggtagactactggataagtgagggattcataaatgaaaaagaaggcagagagaggaatattaaccaaggttatgagataattggtacccttgtccgtgcatgtttgttgttggaggaagaaaggaacaaatcaaacgtgaaaatgcatgatgtggttcgtgagatggctctatggatatcatccgatcttgggaagcaaaaggagaaatgtattgtgcgagctggtgttgggttacgtgaagtaccaaaagtcaaggattggaacactgtgagaaagatttctttgatgaataatgagattgaagagatatttgacagtcacgagtgtgctgcacttacaactctatttctccaaaagaacgacgtggtaaagatctcggctgaattctttcgatgtatgcctcatctggtggttttagatctatcagagaatcagagtcttaatgaattaccagaagaaatatcagagctggcctctttgagatatttcaacttgtcatatacatgtatacatcaactacccgttggtttatggacattgaaaaagctaatacatctgaatctcgaacacatgagcagtcttgggagtatattagggatatcaaatttgtggaatttgaggacattgggactacgagattccagactgttgctagatatgagtttagtgaaggagctgcagctcttagaacatctagaagttataaccctagatatatcatcaagtttggttgcagagccattgttatgctctcaaaggttggtggaatgtataaaagaggtagattttaagtaccttaaggaagaatcagtgagagtattgactttgccaaccatgggtaatctccgcaagctcgggataaaaagatgtggaatgagggagataaagatagagaggacaacttcatcatcgtctcggaacaaaagtcccacaactccatgcttctcaaacctctccagagtctttatagctaaatgccatggtcttaaggatttgacgtggcttttgtttgctcctaatcttacttttcttgaagttgggttctcaaaggaagtagaggatataattagtgaagagaaagctgaggagcattcagctacgattgttccttttaggaaattggagacactacacctgtttgaattacgcgggctcaagagaatctatgcaaaggctctgcattttccgtgtctgaaagttatccacgtagaaaaatgtgaaaagctgagaaagcttccattggattctaaaagtgggatcgcgggtgaagaacttgtcatatattatggagagagagaatggatagaaagggttgaatgggaggaccaagcaactcaactccgtttcttaccttcatccaggtggcggtggagagaaacataatgaacttcactttcttctacaaacttttgttgtcatggtctaaagacatttgccggtgtgtaaatctcttccttgtctcttcttgtttgcataaccgttctcatcgttcttttggttagtgatcattggatttgtacttatctctttctctaaacgatgagtgtttgtttcggcttcatagaaacattacacagagactcatgagaaaatgaataaaaacttgcaagttcctaaccattgtaataaaataataattaac

SEQ ID NO: 388 - DNA, 1159 bp, Arabidopsis thaliana
  source 1..1159: mol_type = genomic DNA
gtttggtttaggcatctgaaatctaccgaaatgggccggtaattagctcatacccaacacgaccagaccagaccgacccgacccgacggctccagattcatccatgtttcatcttcctcatcagatctaattcaatctgcgaatttctcttaaaccctaaccctctcgctgccgtccggtggtttttccgacgacgaactatgacgattcacgctgcagtaatccagaagcttctgaacaccggagcacatctcggccgtcgtgccgccgagcaccatttcaagcaatacgcttacgggacgcgtaacggaatgacaattatcgactccgacaaaaccctaatttgcctccgtagcgccgctcatttcgtcgctaacctcgcccacatgagaggtaacatcttcttcgtcaacacgaatcctctcttcgacgaaatcattgagctcacttctcgtcggatccaaggagattcgtataatcacaaccgtgcgatgaatctgtggaagatgggagggtttttgactaacagctacagtcctaagaagtttcgatctaggcataaaaagctttgctttggtccaactactatgcctgattgtgtcgttgtgtttgattctgagaggaagagctctgtgatacttgaggcatcgaagcttcagattccggttgttgcaattgtggacccgaatgtgccattggagttctttgagaagattacgtatcctgtgccagctcgtgattcggtcaagtttgtgtatttgttctgtaatgtgatcaccaagtgctttgtggcagaacagatgaagttggggatcaaagaagggagcaatgaagatttgatgaaggatttagctgcttgattttgatatttgcaacaaaagtatgaaactttacagttgtttttctgagtctggaataattgttcttcagaattgtggttacttcaactttgaaattctgggagttttttacacatggatgattttgtttctctgatggatatttctgtataagattgttgagttctagtgttctacatcttgataactgccttgtcttttccttgcacaactcattttttggaaatgctttagacattgtatatggtaatcgttacttcacaagttttggaatgagctatttacaagtaactgtctgg

SEQ ID NO: 389 - DNA, 3126 bp, Arabidopsis thaliana
  source 1..3126: mol_type = genomic DNA
caatgataagattctaaagtagattgagacaagtttcgtagtcggcagcagtaaccaagaaaacgagtaaggttgactcttgacttgttaaaccattgacttcaatttcgataaagtctctatgtaagctcatttttctgaaacaagttttgctaaaaaaatccaaagatctgaagcttcagatccttctcggctaaggctaagtcacaaccttgtaagtttactttactttggttagatttgtttcaatgttctaggattctacatgtttcttgagaagatatggattagttaaagaataatccaatcttttggttattgagattctatagtcgttggttgattgatttttggaaagttcaatctagtgatgatacacataaccgattgaattattgcttggttatagtttaccaattagagatatttcttgaagttgcagggtctgagtaaatggtggacgctgttgtaacagtgtttttagagaaaaccttgaacatcctcgaagaaaaaggccgaaccgtatcggactaccgaaaacagttggaagatttgcaaagcgaattgaaatatatgcagtcttttctcaaggatgcagagaggcagaagagaactaatgaaacgttgcgtactcttgttgcggatttacgagaactggtttacgaagctgaggatatacttgtggattgtcagctcgcggatggtgatgatgggaacgagcaaaggtcatcaaatgcgtggctttcgcggcttcatcctgcccgggttccgttgcagtacaagaaaagcaaacgtttgcaagagatcaatgagaggataacgaaaataaagagtcaagtagagccttatttcgaattcataacgccgagtaatgttggaagagataatggaactgatcggtggagctctccggtgtatgatcatactcaggtggttggtttggaaggagataaaagaaaaatcaaggagtggctctttcgatcaaacgacagccagcttttgataatggcctttgttgggatgggagggctaggtaaaactacaatcgctcaagaagtgttcaatgacaaagagatcgaacatcgtttcgaaagaaggatatgggtgtctgtgtcccagacttttactgaagaacagatcatgagaagcatattgaggaacttgggggacgcgagtgttggagatgatattggaacattgctgagaaaaatccagcagtatcttttggggaaaaggtacttgatagttatggacgatgtatgggacaagaatttgagctggtgggacaagatctaccaaggactgcctagaggacaaggaggtagcgttatcgtgaccacaaggtcggaatctgtagcgaaaagggtgcaagcgagagacgacaagactcaccgtccagagctccttagtcctgataacagttggctgctgttttgtaatgtggcatttgcagcaaatgacggtacttgtgagcgtcccgagctagaggatgttggcaaggagattgtaacgaaatgcaaaggtttgcctttgacaatcaaagcggttggtgggttacttctgtgcaaagaccatgtctatcatgaatggagacgaattgcagagcattttcaggatgagctaagaggaaacacttctgaaactgacaatgttatgtcttctctgcagttgagctacgatgaactcccttcccaccttaagtcgtgcattctcacgctttcgctctatccagaagactgtgttataccaaaacaacaactagtacatggatggatcggagaaggttttgtcatgtggagaaacggaagatctgcaactgaatctggagaagactgcttttccgggctcacaaacaggtgtctaatagaagttgtagacaaaacctatagcggaaccatcatcacttgcaagattcatgacatggttcgtgatttggtgatcgatatagccaagaaggattcgttctctaacccggaaggcctcaactgtcgtcaccttgggattagtggaaactttgatgagaagcagatcaaagttaaccataagctgagaggcgtagtgtcaacaactaagacaggtgaagtgaacaagctcaactcagacttagctaagaaattcacagactgcaaatatcttcgggttctcgatatctcgaaatccatatttgatgctcctctgtctgagattttggatgagattgcaagccttcaacacttagcatgtcttagtttgagcaacacacatccgttgatccagtttcctcgttccatggaagatctccacaaccttcagattctagacgcaagctactgtcagaatctgaaacaacttcaaccttgcatcgtcttgttcaagaaactccttgtacttgacatgacgaactgtggatcccttgaatgcttccccaagggtatcggaagtctcgtgaagctcgaagttctgttgggatttaagccagccaggtccaacaatgggtgcaagctcagtgaagtgaaaaatctcacaaaccttcggaaacttggtctttctctgactcgtggcgatcagatagaagaggaggagcttgattctttgataaacctaagcaagctgatgtccatttcgatcaactgctatgatagctacggcgatgatctcataaccaaaatagacgcccttactcctccacaccagctccatgagctttctctacaattctatcctggaaagtcgagtccatcgtggttgagtcctcacaagcttccgatgttgaggtacatgtcaatatgttcaggtaatttggtgaaaatgcaggaaccattctggggaaacgagaatactcactggagaattgaaggtttaatgttaagttcattgtcggacctagacatggactgggaagtgctgcaacagtcaatgccgtacctgaggaccgtgaccgcaaactggtgtccagagctagagtctttcgcgattgaagatgttggctttagaggcggagtgtggatgaaaacaccattgcacagaacctgatgaaacgttttaagcaactagatcaatgtttattaaacagtgacaataagttggtgtattacatataccttgatacaatgtaatgttgctttgaccgtttggatttcatatcgc

SEQ ID NO: 390 - DNA, 1170 bp, Arabidopsis thaliana
  source 1..1170: mol_type = genomic DNA
gaaaacggcccatataaatccaccaaacgaatcttctctcttggtataaatatgctgtcttgcgttacagagaaaccctagacgtcgaagatgaagttcaacgttgcgaatccaactactggatgccagaagaagctcgagatcgacgatgaccagaaactacgtgcgttttacgacaagagaatctctcaagaagtcagtggagatgctttgggcgaggagttcaaaggatacgttttcaagatcaagggtggttgcgataagcaaggtttcccaatgaagcagggagttttgactccaggccgtgttcgccttttgcttcaccgaggaactccttgcttcagaggacatggaaggagaactggtgagaggagaagaaagtctgttcgtggttgcattgtgagccctgatctctctgttctgaaccttgtcattgtgaagaagggtgagaacgatcttcctgggcttaccgatactgagaagccaagaatgagaggaccaaagagagcctccaagatccgtaaactgtttaacctcaagaaggaagatgatgtcaggacctatgtcaacacttaccgccgcaagttcacaaacaagaagggcaaggaagttagcaaagcccctaagatccagaggcttgtgaccccattgactcttcagaggaagagagctagaattgctgacaagaagaagaaaattgctaaggctaattctgatgctgctgattaccagaagcttctcgcctcgaggttgaaggaacagcgtgacaggaggagtgagagtttggcaaagaagaggtcgagactctcttctgctgctgccaagccctctgtcacagcttaaaaaagcttgagaatcaaatcaaagatgtcacctttctagttttgttctcttttcttctccggctattaaaaagttagttcgagttcatattcagctgtttttgttccaagacatgggtacacaatcgctttgggcttgtttcatgatttatgcttttagttgaagaccattttaaactcaatttttattgcttatctttctcagtttttgatcaaagcgtttctccattgaaaaccattttaatcacctgtttcaatcatacataatgttaaacacatgtactggcgattacaataggtatatattttgactgaaatttatggagca

SEQ ID NO: 391 - DNA, 3147 bp, Arabidopsis thaliana
  source 1..3147: mol_type = genomic DNA
aatggagttgccatggaggttgaggtaatttgtagctcgaatgcatctgatcatgcagttagtatagataatctgtggatattttgcaatattcgtagggaaaaggaaccaaaaatccatcaagttgtaagtgtttagcaaatatctacaagacttcatcttttgtgctttctcttaaatgtatccgatttttttttgcatttgaaagttctacaatattattagagtagtgggaaatgtcataatcgtggaaaagtataaatattttcaataatgcatacagtaatcattgattccctttgtgtggttgaaattctattctatacatctttaaattcgatatagtaatcatttattccctatctcttcttttcatcattttgaataattgtcactcactcaatttggtttcttgttttgctctctagatctctcttttctctcttctttccatctccagcaatgggagcttgtttaacactctcgttctcttgtgatgaagttgtgaatcaaatctctcaaggtttatgcatcaacgtgggttatatttgcgagctctccaagaatgtagtggctatgaagaaagacatggaagtgctgaagaaaaagcgagatgatgtgaaaagaagggtagatatagaagagttcacaaggcgtcgtgaaaggctttctcaagtccaaggatggcttacgaatgtctcgaccgtcgagaataaattcaatgaactgcttaccactaatgacgctgagcttcaaaggttgtgtctctttggattttgctctaaaaatgtgaaaatgagctatctttatgggaaaagggttgtcctgatgttgaaggagattgagagtcttagttctcaaggagattttgatactgtgactttagccactccaatagctaggattgaagagatgcctattcaacctacaatcgtaggtcaggaaacaatgctcgaaagggtatggacccgtctcacagaagacggagacgagattgtgggtctttatggcatgggtggagtaggcaaaaccacccttctcacacgaatcaacaacaagttttctgaaaaatgtagcgggtttggggttgtgatatgggtggtggtgtctaagagtccagatatccataggattcaaggagacatcgggaagagactagaccttggaggcgaagagtgggataatgtaaatgaaaaccagagagcccttgacatatacaatgtccttgggaaacaaaaatttgtgttgttgttggatgatatatgggagaaagtgaatttagaagtgcttggagtcccttatccaagcagacaaaatggatgcaaagtagtattcaccactcgttctagagatgtttgtgggcgtatgcgggttgatgacccgatggaagtcagttgcctagaacccaacgaagcctgggaattgttccaaatgaaagttggagaaaacacattgaaaggccatccagacattcctgaacttgcaagaaaagttgctggaaaatgttgtggcctaccattggcacttaatgtcattggcgagaccatggcatgcaaaaggatggtacaagaatggcgtaacgcaattgacgttttgagctcatatgctgcagaattccctggtatggaacaaattcttcctattctaaagtatagctatgataatttaaacaaggagcaggtgaaaccatgtttcctatattgctctctgtttcctgaagattatcgtatggaaaaagagaggttgatagactattggatatgtgagggattcatagatgaaaatgaaagtagagaaagagcattaagccaaggttatgagatcattggtatccttgtccgagcatgtttgttgttggaggaagctatcaataaagaacaagttaaaatgcatgatgtggttcgggagatggctctatggattgcatctgatcttggggaacataaagaaagatgtattgtgcaagtcggtgttggattacgtgaggtaccgaaagtcaagaactggagttctgtgagaaggatgtcgctgatggaaaatgagattgaaattttatctggcagtcccgaatgcctggaacttacaactctgttccttcagaaaaatgattcattgctacatatctcggatgaattcttccggtgtatcccaatgctagttgttttggatctatcagggaattcaagtctccggaaattgcctaaccaaatatcaaagttagtctccttgcgttatcttgacttgtcgtggacatacattaagcggctacctgtcggtctacaagagttgaaaaagctcagatatttgagattggattacatgaagagacttaagagtatttcagggatatcaaatatatcaagtttgaggaaattgcaacttttacagtctaaaatgtcgctagacatgagcttagtggaggagttgcagctattagaacatttagaagttctaaacataagtatcaagtcaagcttggtagtggagaagttgttaaatgctcccaggttggtgaaatgtcttcaaatcttagtacttagaggagttcaggaagaatcatccggagtattgactttgccagatatggataatctcaataaagtcatcataaggaagtgtggaatgtgtgagataaagatagagaggaaaactttatcattatcatcgaacagaagtcccaaaactcaattcctccataacctctccactgtgcatataagtagctgtgatggtctgaaggatttgacgtggttgttgttcgctcctaacctcactagtctcgaggttctggactcggaactagtagaaggaataataaaccaagagaaagctatgactatgagtggtatcattcctttccagaaactagagagtctacgcctacacaatctagcgatgttgaggagcatctactggcaacctctgtcttttccatgtctgaagacaattcacataacgaagtgtcctgagctgagaaagcttccattggattctgaaattgccataagggatgaagaacttgtcattaagtaccaagaggaagaatggcttgaaagggttgaatgggacaacgaagccacaagactccgtttcttaccttttttcaagttctttggacctgaatggcaagttagttatgtgcggtag

SEQ ID NO: 392 - DNA, 3034 bp, Arabidopsis thaliana
  source 1..3034: mol_type = genomic DNA
caaaaaaacaaagaaggattataagctatacttacttttcagcttctctcatggaagaatcttcatctttgtcattgcagtcttgcaattggagacaccatgtgtttccaagcttcagcggcaaagatgtccgcagaacctttctcagccaccttctcaaggagttccggcgtaagggaatccgtactttcatagataatgatatcaagagaagccaaatgatcagttctgagcttgtacgagctatcagagaatctaggattgcggttgtagtgttgtcgcggacctatgcatcttcaagctggtgtttgaatgagttggtggagataaagaaagtaagccagatgatcatgccggttttctacgaggtggatccatctgatgtgaggaaacgaacgggagaatttggaaaggcgtttgaggaagcatgtgaaagacaaccagatgaggaagtgaagcagaaatggagagaagcattggtctatatagctaatatagccggcgagtcttctcaaaactgggacaatgaagcagatctgattgacaagattgctatgagcatttcatatgaattgaattctacattatcacgagattcctacaatctggttggaatcgacaatcatatgagagagctggattctttgttatgtctggaatcaactgaagtgaaaatggtggggatttggggtcctgcaggtattggcaagacaacaattgccagagctttattcaaccggctatctgaaaacttccaacacactatttttatggagaatgttaagggaagttctaggacctcggagctcgatgcctatggcttccagttgcgtttgcaagaacagtttctgtctgaagttattgatcataagcatatgaagatacatgatttaggtttggtaaaagaaagattgcaggatctgaaagttcttgttgttcttgatgatgttgataaactagaacaacttgatgccttagtgaaacaatctcagtggtttggttctggaagtaggatcattgtgaccacggaaaacaaacagctattgagagcgcatgggatcacttgcatatatgagttgggttttccatctagaagtgattctcttcagattttctgccaatatgcatttggagagagttctgcaccagatggttgtatcgagcttgctactgaaataacaaagcttgctggctatcttcccctagctctaaaggttttggggtcctctctgcgagggatgagcaaagatgagcaaaaatcagcattgcctcgactcagaaccagtcttaatgaggatattagaaatgttttacgagtcggttatgatggtatacatgacaaggataaggtcatattccttcatattgcttgtttattcaatggtgagaacgttgattatgtgaagcaaatacttgcaagttctggcttggatgtcacatttgggcttcaagtccttaccagtaggtctctcatacacatatcgagatgcaatcgtactattacgatgcacaatttgctagaacaattgggtcgagaaattgtttgcgaacaatctattgccgagcctggcaaacgtcaattcttgatggatgcttcagagatttatgatgtacttgctgataacactggtactggagctgttttgggcatatctttggacatatctaagatcaatgagttgtttctgaatgaaagagcttttggtgggatgcataatctgttgtttctaagattctacaagtcctcttcgagtaaagatcaacctgagcttcatttacctcgaggcttggattatttaccccgtaaacttaggctgctgcattgggatgcattccccatgacatcaatgcctctgagtttttgtccacagtttcttgttgtgataaacataagggagagccagcttgagaagctgtgggaaggaacacaacctcttagaagtctaaagcagatggatttaagtaagtctgagaatctaaaagagattcctgatctttcgaaagcggtaaatatcgaggaactctgtctcagttattgtggaagtttggtgatgttaccttcctcgatcaagaacctcaacaaattggttgttcttgacatgaagtattgctcaaagctagagattatcccctgcaatatggacttagagtcccttagcatcctcaatcttgatggatgctcacgattggagagttttccagaaatttcttcgaagattggatttctctctctgtcagaaactgcaatagaagaaattcccacaacagtcgcgtcttggccatgtctggcagcattggacatgtcaggctgcaagaacctcaagacgtttccatgtcttccaaaaactatagaatggttggatttgagcaggacagagatcgaagaagttcctttgtggatcgataaactctcaaagctcaataaactattgatgaacagctgcatgaagctaagaagcatctcttctgggatctctacgctggaacatatcaaaacactagattttttggggtgcaagaatattgtgagctttcctgtagagatattcgagagctctcggttctgtcataatctggtgatggagatgagaaacattcaaaaccctgatcttcctcgaccattttatttcaagaacaactatattgacactattccagattgtattacacgtcactgcaagctgccttttctgaattcatcaggatcaatctccagcaagatagagaatgatttcatctggttcgataaataaatatcagtgaagaattgcatgataatgatgagtcagatggagtttcatcttcaaaccctgctcattacaattgtaagtgacatcatttgacttttcccctgtggacccatctttgggcactgcaagtgttccagaccatatagttcaacatctctgaaactgagaatgaaatccgtgtacgttgggcacgttattattgttgaaatgtaggttcttgtaagatatagcttatagacaattgtttgtatatccgtgtacgttgggcacgttattattgttga

SEQ ID NO: 393 - DNA, 3099 bp, Capsicum chacoense
  source 1..3099: mol_type = genomic DNA
caaatatttcttggagtgaatttgaagttgtattatctgcaattgaatggttggtcatagtcgcaaaggacaaaaacgagaatacagtatatatggctcatgcaagtgtggcttctcttatgagaacaatagaatctctcttgacattcaattcgccgatgcaatctctatcctgtgatcacagagaagaactttgcgctcttcgtgaaaaagttagttccctggaagtatttgtcaagaactttgagaaaaacaatgtttttggggaaatgacggattttgaagtagaggtaagagaagttgcaagtgctgctgaatacacaattcaactgagactaacaggaactgtactgggagaaaataaaagccagaaaaaaaaggcgcgtcgaaggtttcgtcaaagcctgcaacaagtagcagaggacatggatcatatctggaaagagtcgacaaagatccaagataaaggaaaacaagtatcaaaggaatcattggttcatgatttttcaagttcaacaaacgatattttgaaggttaagaacaatatggttggacgtgatgatcaaaggaaacagttgttagaagatctgactagaagctactctggggaacccaaagtcatcccgattgtcgggatgggaggcataggtaaaacaaccttagcaaaagaagtttacaatgatgaatcaattctatgccgttttgatgttcatgcctgggctaccatatctcaacagcacaacaaaaaggaaattttgctgggccttctgcattccacaatcaaaatggatgacagggttaagatgattggtgaagcagagctagcagacatgttacagaaaagtttaaagagaaagaggtacttaattgtcttggatgatatctggagttgtgaagtgtgggatggcgtgagacgatgctttccaactgaagacaatgcagggagtcgaatactgttgactacccgtaatgatgaagtagcttgttatgctggtgtagagaatttttctttgcggatgagcttcatggatcaagatgagagttggagtcttttcaaaagtgcagcattttcaagtgaagcattaccatatgagttcgagactgttggaaagcaaatcgcagatgaatgtcacgggttaccactaactattgtcgtggttgcagggcttctcaaatctaaaaggacaatagaagattggaaaactgttgctaaagatgtcaagtcattcgtcacaaatgatcctgatgaacgatgttcacgtgtgcttgggttgagttacgatcacttgacaagcgatctaaaaacatgtcttctgcatttcggaatttttccagaagacagtgatattccagtgaagaatttgatgagatcatggatggctgaggggttcctgaagttggaaaatgatttggaaggagaggttgagaagtgtttgcaagagcttgtcgatagatgtctagtcctcgtcagcaagagaagtcgagatggaacaaaaattagatcatgtaaggttcatgatctaatatatgacctgtgcgtgagagaagttcaaagggagaacatttttatcatgaacgacattgttcttgacgtatcatatccagaatgttcatatctctgtatgtataaaatgcagccctttaagcgcgtgactggtgatgaaattaattattgtccctatggtctttatagggctcttcttacccctgtaaatcgtcagttgagagatcatgacaacaacaatcttttgaaacgaacccattctgttttctcttttcatcttgagcctttatattatgttctcaaatcagaggttgttcatttcaaattactcaaagtcttggagctgagacacagacagattgatggtttccctcgagagatactaagcctcatctggttgaggtacctatcattgttcagctatgggaatttcgatgtacctccagaaatttgcaggttatggaatctgcagacattcattgttcaacggtttcgatcagatataataatttttgctgaggaaatttgggaactaatgcaattaaggcatcttaaactgcccagattttatttgccagattgcccaagtggatctgttgacaaaggaaggcacttggatttttcaaacttacaaactatttcttacttgtctccacgttgttgcacgaaggaggttattatggggattcagaatgtcaaaaaattaggaatcagtggaaataaggatgactataaaagttttcgggactctgggcttcccaacaatcttgtctatctgcagcaacttgaaatattgagtcttatatctgttgattatagccttttgccagtgatcatttcaagtgcaaaagcttttccagcaacgctcaagaagttgaagttggaaagaacttatctaagctggtcatacttggacatcatagctgagttgcctaaccttgaggtgctgaagctgatggatgacgcttgttgtggtgaagaatggcatccaattgttatgggatttaatcgattgaagcttttgctaattaaatatagttttctcaagttctggaaagccacaaatgacaattttcctgtccttgagcgcctcatgattagaagttgcaaaaatttgaaagagatacccattgagtttgcagatatacacacactacagctgattgagttaagagagtgtcctcccaaacttggggaatctgctgcacgaattcagaaagaacaagaagacctcggaaacaaccctgtggatgttcgtatctcaaatccattgaaggagagtgattctgattcagaagaacattaggaaaggatctcaaggccagaaggattgaactcttgggatttcatttcggccctctatcacaaaataccactaaattatcggtttcaagcaatgtgtgacttccaaggagatgtgatatcttttgtgttgtaacatatttttgagttgtactgattcccttcttcccttctctttttatgtaactttactaattcaacttcaagtactagcagaccacatggttgattgtgatcgagtttgatgattattttatacgatgagacaaccagtttagttttaaaaaaaaaaa

SEQ ID NO: 394 - DNA, 4010 bp, Glycine max
  source 1..4010: mol_type = genomic DNA
aatacagctgttaaagtttgtcttgttgggaacactcaacagttattggttgactcaatcttaattaaagccatccttcataaaattgcctatcactgatttgatcagttcatgaaccctgcactgcacttcaaattactcattttcattcatccactcaactccctttcctaccatggcactagaattggttggtggtgctcttctttctgctttccttcaggttgcgtttgagaagcttgcttctcctcaagttctggacttctttcgtggaagaaagcttgatcaaaagctgctcaacaacttggaaatcaagctgaactccatacaggctctggctaatgatgcagaactaaagcagttcagagatccacttgtcagaaactggcttcttaaggtcaaagatgctgtgtttgacgcagaggatatcttggatgaaatacaacatgagatctccaaatgccaggtcgaagctgaagctgaagctgagtctcaaacctgcacttgcaaggtaccaaatttcttcaaatcttctcctgctagttcctttaacagggaaattaaatccaggatggaagaaatccttgatagattagatcttctctcaagccaaaaggatgatctaggcttgaaaaattctagtggtgttggcgttggatcagaattgggtagtgcagtaccacagatatcacaatcaacatcttcagttgttgaaagtgatatttatggcagagataaagacaaaaaaatgatttttgattggctgacatctgacaatggcaatcctaaccagccatcgatactttctattgtgggcatgggtgggatgggtaagaccacacttgctcaacatgtattcaatgaccctaggatcgaggaggctagatttgatgtcaaagcttgggtctgtgtttcagatgattttgatgctttcagggtaacaagaacaattcttgaggccatcactaaatcgactgatgatagtagagacctagagatggttcacggaagattgaaagaaaaattgacggggaagagatttcttcttgttttggatgacgtttggaacgaaaaccgacttaaatgggaagctgtgctaaaacatcttggttttggggctcaggggagtagaattattgccaccacacgtagtaaggaagttgcttctaccatgaggtcaaaagaacacctcctggagcaattacaagaagatcattgctggaagttgtttgctaaacatgcattccaagatgataatattcaaccaaatccagattgcaaggagattggtatgaagatagttgaaaaatgtaaaggacttcctctggccttgaaaacaatgggaagtctattacacaacaagtcatctgttacggaatggaaaagcatattgcagagcgagatatgggaattttcaacagagcgtagtgatattgtacctgctttagcactaagctatcaccatcttccttctcatctcaagagatgttttgcttattgtgccttattccccaaagattatgagtttgataaggagtgcttaatacaattgtggatggctgaaaaatttctacaatgttctcaacagggtaagagtccaggagaagttggtgaacaatacttcaatgatctattatcaaggtgcttctttcaacaatcaagcaacacagagagaacagattttgtcatgcatgaccttctcaacgatttggcaagatttatttgtggggacatttgtttcagattggatgggaatcaaacaaaaggtacaccaaaagcaacccgtcattttttaattgacgttaaatgttttgatgggtttggaactctatgtgacacaaaaaagttacgtacttatatgccaacaagttacaaatattgggattgcgagatgtcaatacacgaattgttctccaagtttaattacttacgtgtcttatctctgtttgattgtcatgacctaagagaggtgcctgactctgtgggtaatctcaaatatctccgttcgttagacttatccaatactaaaatagaaaaactacctgaatcaatatgttcactctacaacttgcaaatactgaagctaaatggttgtagacatttgaaggagctgccctcaaatttgcataaactcactgatttgcatcggcttgaattaatagaaactggagtgagaaaggtaccagcacatttgggaaaactggagtatcttcaagtattaatgagttcgtttaatgttggcaaaagtagggagttcagtatccagcagttaggagaactcaatcttcatggaagtctatcaataaggcaactgcagaatgttgagaatccatcagatgcattagcggtggatttaaaaaataaaacacaccttgtcgaggtagagttagaatgggattcagactggaaccctgatgattcaacaaaagaaagggatgtaatcgagaatctacagccttccaaacacttggagaagttgaggatgaggaactatgggggtactcaatttccaaggtggttattcaacaattcatcatgtagtgtggtgtccttaaccttgaagaactgtaaatattgcctatgtttgcctccccttggacttttgccatctctgaaggaactttcaattaaagggcttgatgggatcgtgagtatcaatgctgattttttcgggagtagctcttgttcatttacatccttgaaatctttggagttctaccatatgaaggaatgggaagaatgggaatgtaaaggtgtgacaggtgcttttccacgtcttcaacgtctttctatagagcgttgtcccaagctgaaagggcacttgccagagcaactatgtcatttaaattctctaaagatttctgggtgtgaacaacttgtaccttctgctctcagtgcccctgatattcataaattatacctaggagactgtggagagctgcaaattgatcatgggacaactttgaaagagcttaccattgaaggtcacaacgtggaggcagccttattcgaagagattgggcgcaattactcttgttcaaataacaatattcccatgcacagttgctatgatttccttgtaagcttgcgcatcaaaggtggctgcgactctttaacgacctttccgctagatatgttcacaatactcagggaactttgtatctggaagtgtcctaatctacggaggatttcacaagggcaggctcataatcatctccagactctggatatcaaagagtgcccccaattagaatcattgcctgaaggaatgcatgtcctccttccatctcttgattctctgtgcatagatgattgtccaaaagttgaaatgtttcccgaaggaggtttgccatcaaatttaaaagaaatgggtctctttggtggtagttacaaacttatctccttattgaaaagtgccttgggaggcaatcactctctagaacggttagttattggaaaagtggattttgagtgtcttcctgaggaaggtgtactgccacactctcttgtttctctacagatcaatagctgtggagatcttaaaagactggactacaaaggtatctgccacctctcctctctcaaggaattgagtcttgaagactgccccaggctccaatgcttaccagaggagggtctgcccaaatccatttcaactttgtggatttggggggactgtcagttgctcaaacaacgttgccgggaacccgaaggcgaagactggccaaagattgctcacttttgcccgttgctcaatcaacgttgccgggaacccggaggcgaagactggccaaagattgctgacattgaaaacgtgtatataaggtagtgaggttgattataaagaataatggtgaaagatgtagatgcttctctattgcctgcaatttactaaataattgttttctaaacttatttttgctttctgcttgctggacgccgccgctcagttatttattattcgacaaaataattgtttaatatagtttcaagtgattgattctgcttgg

SEQ ID NO: 395 - DNA, 3639 bp, Glycine max
  source 1..3639: mol_type = genomic DNA
atggcagtagaattaattgctggtgctcttctttcttctttccttcaggttgcattcgaaaagcttgcttctcctcaagttctccacttctttcacggaaaaaaacttgatgagacgcttctgagaaagttgaaaattaagctgctgtccatcgatgctctggctgatgatgctgaacgaaagcagttcgcagatccacgcgtgagaaactggcttcttgaggtcaaagatatggtttttgatgcagaggatctcttggatgaaatgcaatatgaattctccaaatgggaactggaagctgaatctgaatctcagacctgtaccggctgtacttgcaaggtaccaaatttcttcaaatcttctcctgctagttcctttaacagggaaattaaatccaggatggaaaaaatccttgatagcttagaatttctctcaagccaaaaggatgatctaggattgaaaaatgctagtggtgttggcgttggatcagaattgggtagtgcagtaccacagatatcacaatcaacatcttcggtggttgaaagtgatatttatggcagagataaagacaaaaaaatgatttttgattggctgacatctgacaatggcaatcctaaccagccatcgatactttctattgtgggcatgggtgggatgggtaagaccacacttgctcaacatgtattcaatgaccctaggatccaggaggctagatttgatgtcaaagcttgggtctgtgtttcagatgattttgatgctttcagggtaacaagaacaattcttgaggccatcactaaatcgactgatgatagtagagacctagagatggttcacggaagattgaaagaaaaattgacggggaagagatttcttcttgttttggataacgtttggaacgaaaaccgacttaaatgggaagctgtgctaaaacatcttgtttttggggctcaggggagtagaattattgccaccacacgtagtaaggaagttgcttctaccatgaggtcaagagaacacctcctggagcaattacaagaagatcattgctggaagttgtttgctaaacatgcattccaagatgataatattcaaccaaatccagattgcaaggagattggtacgaagatagttgaaaaatgtaaaggacttcctctggccttgaaaacaatgggaagtctattacacgacaagtcatctgttacggaatggaaaagcatattgcagagcgagatatgggaattttcaacagagcgtagtgatattgtacctgctttagcactaagctatcaccatcttccttctcatctcaagagatgttttgcttattgtgccttattccccaaagattatgtgtttgataaggagtgcttaatacaattgtggatggctgaaaaatttctacaatgttctcaacagggtaagagtccagaagaagttggtgaacaatacttcaatgatctattatcaaggtgcttctttcaacaatcaagcaacacaaagagaacacattttgtcatgcatgaccttctcaacgatttggcaagatttatttgtggggacatttgtttcagattggatggtgatcaaacaaaaggtacaccaaaagcaccccgtcacttttcagttgcaatcgaacacgttcgatactttgatgggtttggaactctatgtgatgcaaaaaagttacgttcatatatgccaacaagtaacaaaaagatttttgattacttctcttcttgggatcgcaatatgtcgatacatgaactggtctccaagtttaagttcttacgtgtcttatctttatctcattgttctaacctaagcgaggtgcctgactctgtgggtaatcttaaatatctcagttcgttagacttatccaatactgaaatagtaaaactacctgaatcaatatgttcactctacaacttgcaaatactgaagctgaattattgtaaacaattggacgagctgccctcaaatttgcataaactcactgatttgcatcgccttgaattaatagatactggagtgagaaaggtaccagcacatttgggaaaactgaagtatcttcaggtatcaatgagtccgtttaaggttggcaaaagtagggagttcagtatccagcagctaggagaactcaatcttcatggaagtctatcaattcagaacctgcagaatgtcgagagtccctcggatgcattagcagtggatttgaaaaataaaacacaccttctggaggtagagttagaatgggattcagactggaaccctgatgattcaacaaaagaaagggatgaaattgtaatcgagaatctacagcctcccaaacacttggagaagttgaggatgaggaactatgggggtaaacaatttccaaggtggttattaaacaattcattattgaatgtggtgtccttaaccttggagaactgtcaatcttgccaacgtttgcctccccttggacttttgccatttctgaaggagctctcaattcaagggcttgcagggattgtgagtattaatgctgattttttcgggagtagctcttgttcatttacgtccttggaatctttgatgttccacagtatgaaggaatgggaagaatgggaatgtaaaggtgtgacaggtgcttttccacgtcttcaacgtctttctatagagtattgtcccaagctgaaggggcacttgccagagcaactatgtcatttaaatgatctaaagatttatgggtgcgaacaacttgtaccttctgctctcagtgcccctgatattcatcaattatccctaggagactgtggaaagctgcaaattgctcatccgacaactttgaaagagcttaccattacaggtcacaacgtggaggcagccttactcgaacagattggacgcagttactcttgttcaaataacaatattcccatgcacagttgctatgatttccttgtaaggttggtcatcaatggtggctgcgactctctaacgaccattccactagatatgttcccaaaactcagggggcttgatatcgggaagtgtcctaacctacagaggatttcacaggggcaggctcataatcatctccagagtctgtatatcaaagagtgcccccaattagaatcattgcctgaaggaatgcatgtcctccttccatctcttcattatctgagcataagggattgtccaaaagttgaaatgtttcccgaaggaggtttgccatcaaatttaaaaggtatgagactccatggtagttacaaacttatgtcctcattgaaaagtgccttgggaggcaatcactctctaattagcttatatattggaggagtggatgttgagtgtcttcctgacgaaggtgtactgccacactctcttgtttctctatggatcagtgactgtgaagatcttaagagactggactacaaaggtctctgccacctctcctctctcaagaacttgtttctttatgactgccccaggctccaatgcttaccagaggagggtctgcccgaatccatgttatctttgcacatttacgattgtccgttgctcatacaacgttgccgggaacccgaaggcgaagactggccaaagattgctcacattgattataaagaatttaatggtgaggttgattataaataa

SEQ ID NO: 396 - DNA, 3306 bp, Hordeum vulgare
  source 1..3306: mol_type = genomic DNA
atggtgagcgccttggcaggggtgatgacctctgtcatcggcaagctcaccgccctgctcggggaggagtacgcaaagctgaaaggtgtgcacagggaggtggagttcatgaaagatgagctgagcagcatgaacgcgctccttcagaggctggcagaggcggaccgtgatcttgatgtgcagacgaaggaatggagggaccaagttcgggagatgtcttacgacattgaggattgcatagacgactttatgaaaagccttggccaaactgacagtgctcagacagcagggcttgtgcaaagtgtggtccagcagctcaaggcgctgagggcgcgccatcaaatatccagcaaaatccaggggctcaaggcacgtgttgaagatgcaagcaagcgacgtatgaggtataagcttgatgagcgcaccttcgagcctagcatctcaagggctatcgaccctcgtttgccttcactctatgctgagcctgatgggcttgtcggtattgacaagccaagagacgagctcattaagtgcctaatggaggggatgggtgcatcagtgcagcagcaaaaggtgttatctattgtgggtcctgggggtctcggtaaaactacacttgccaatgaggtgtaccgtaaactggaaggccagttccagtgtcgagcttttgtttccttgtcacaacaaccagatgtgaataagatcttaagaaatatactctctcaagtctgccagcaagagcttcctagcacaagtgtacaggacgagggaaaactcattgacgcaatcagagaagttttaaagaacaagaggtacattcaccaactttgaattagttggctgttggtactgcatcattttttcttcagcattgatgcttatttagtagcctagccattctactatagtctactgttgtttaattaaattaaatatagatgattttgtttcattttaagcatatatatgcaattgtgaatagtgctttgattcacagttcatgaggttatctatctaaagggctcaaaagacttcctttaaatatcgtaaccccctatgataaattcaactttttgtggtgtggccaaaccattggggaaggggataatggctgtctgtaatagtaatatatagaagagaaatgattctgtccccataaacagtgaatttcaagaaacctgaagccctatatcattctcatgatttactaacatttgacgacaaggaaacatgccattttatttatttgttcacatattttccttattcatgagatttgcaaaacatgcactttgcaggtacttagttgttattgatgatatatggagtactcaagcatggaagattatcaaatgttctttgtttctgaatgacctgggaagcagaataatgacgacaacacgtagtattgatatagccaagtcatgttgctctcggcgccatgatcgtgtctatgaaataatgcctctgacgacagccaactctaagggtttattttttaaacgaatatttggctcagaagatatatgtcctcctcaattggaagaaatctcctcggaaatattaaaaaaatgtggtggttcaccattagcgattcttacaatagcaagtttattggccaataaagatagcacaaatgaagaatggaagtgggtgtataattcgatcggttcgacactgggaaaggaccccggtgtagaagagatgagaaggatactatctcttagctacgatgatcttcctcaccatttgaagacatgtttattgtatctgagtatatttccggaggactatgagattgagagggatcgattgataaggaggtggatcgctgaaggattcattgatacagatggtggacgagatttggaggaaataggagagtgttattttaatgatcttatcaatagaagtatgcttgagccagtgaaaatccaatatgacggtcaagtcgtttcatgccgagtgcatgatatgattctggatctccttgcatctaagtcaattgaagaaaactttgccaccttctctggtaaccaaaatgagatattagtccttcggcataagatccgtaggctatctctcaattattatgccctagagcacaccatgcttccatcaacagcgatcatttctcattgccgttcgctcagtattgtcgggtatgctgaaaagatgccttctctttcgaagtttcgtgttctgcgagtacttgatattgagaatggtgaggagatggagagcaactgttttgagcatctaaggacgcttttccagttgaggtatttgcgactccacgttagaagtatttctgcactccctgagcagttaggagaactacagcatttgaggactctggatatgggctggacaaagatcacaaaaatgcccaaaagcattgttcagctgcaacatttgacatgtttgcgcgtcagtaatttggaattacctgaagggattgggaatctgcaagctctgcaggagctatcagatatcaaagtcaaccggcacagcacggcgtcttgtttgctggagctgggcagtctgaccaaactgaaaatccttgggctacgctggtcaattgtcagtacacacggtaacgaagacacttttgtggataacttggtatcctcgctgcgcaaactgggcagatccagccttcgatccatatgcattcgtagttatcatggctataccatggagttcttactggactcctggttcccctcccctcatctcatgcaaaagtttcagatgggcacgtactacaacttccccagagttcctccttggatcgcgtcgctggacaagctcacatacctagatatcaatatcgatccagtagaagaggaagcactggagatccttggagaattgccttctttgctgtttctctggctgacatcgaaatcggctgctcccaaacagcggctcgtcgtaagcagcagcatgtttgtgcgtctgaaggagctccacttcacctgctggagcaatgggcaaggactgatgtttgaggccggggccatgccgaggctcgagaagctgtgggttccgtttgacgcaggcagcggtcttgattttggcatccagcacctctcttccctcacgcatcttgccgtcgagatcatttgcgtcggcgcgaccgctcgggacgtagaggcgttggaggaggccatcagaggtgcagcccgtctccttccgaaccgccctgcggtggaattccgaacatgggatgatgaaaagatggtggtggaggaggaggaggggcaaggcgtccctgaagaggagatccacgctagcggttga

SEQ ID NO: 397 - DNA, 3306 bp, Hordeum vulgare
  source 1..3306: mol_type = genomic DNA
atggtgagcgccttggcaggggtgatgacctctgtcatcggcaagctcaccgccctgctcggggaggagtacgcaaagctgaaaggtgtgcacagggaggtggagttcatgaaagatgagctgagcagcatgaacgcgctccttcagaggctggcagaggcggaccgtgatcttgatgtgcagacgaaggaatggagggaccaagttcgggagatgtcttacgacattgaggattgcatggacgactttatgaaaagccttggccaaactgacagtgctcagacagcagggcttgtgcaaagtgtggtccagcagctcaaggcgctgagggcgcgccatcaaatatccagcaaaatccaggggctcaaggcacgtgttgaagatgcaagcaagcgacgtatgaggtataagcttgatgagcgcaccttcgagcctagcatctcaagggctatcaaccctcgtttgccttcactctatgctgagcctgatgggcttgtcggtattgacaagccaagagacgagctcattaagtgcctaatggaggggatgggtgcatcagtgcagcagcaaaaggtgttatctattgtgggtcctgggggtctcggtaaaactacacttgccaatgaggtgtaccgtaaactggaaggccagttccagtgtcgagcttttgtttccttgtcacaacaaccagatgtgaataagatcttaagaaatatactctctcaagtctgccagcaagagcttcctagcacaagtgtacaggacgagggaaaactcattgacgcaatcagagaagttttaaagaacaagaggtacattcaccaactttgaattagttggctgttggtactgcatcattttttcttcagcattgatgcttatttagtagcctagccattctactatagtctactgttgtttaattaaattaaatatagatgattttgtttcattttaagcatatatatgcaattgtgaatagtgctttgattcacagttcatgaggttatctatctaaagggctcaaaagacttcctttaaatatcgtaaccccctatgataaattcaaccttttgtggtgtggccaaaccattggggaaggggataatggctgtctgtaatagtaatatatagaagagaaatgattctgtccccataaacagtgaatttcaagaaacctgaagccctatatcattctcatgatttactaacatttgacgacaaggaaacatgccattttatttatttgttcacatattttccttattcatgagatttgcaaaacatgcactttgcaggtacttagttgttattgatgatatatggagtactcaagcatggaagattatcaaatgttctttgtttctgaatgacctgggaagcagaataatgacgacaacacgtagtattgatatagccaagtcatgttgctctcggcgccatgatcgtgtctatgaaataatgcctctgacgacagccaactctaagggtttattttttaaacgaatatttggctcagaagatatatgtcctcctcaattggaagaaatctcctcggaaatattaaaaaaatgtggtggttcaccattagcgattcttacaatagcaagtttattggccaataaagatagcacaaatgaagaatggaagtgggtgtataattcgatcggttcgacactgggaaaggaccccggtgtagaagagatgagaaggatactatctcttagctacgatgatcttcctcaccatttgaagacatgtttattgtatctgagtatatttccggaggactatgagattgagagggatcgattgataaggaggtggatcgctgaaggattcattgatacagatggtggacgagatttggaggaaataggagagtgttattttaatgatcttatcaatagaagtatgcttgagccagtgaaaatccaatatgacggtcaagtcgtttcatgccgagtgcatgatatgattctggatctccttgcatctaagtcaattgaagaaaactttgccaccttctctggtaaccaaaatgagatattagtccttcggcataagatccgtaggctatctctcaattattatgcccaagagcacaccatgcttccatcaacagcgatcatttctcattgccgttcgctcagtattgtcgggtatgctgaaaagatgccttctctttcgaagtttcgtgttctgcgagtacttgatattgagaatggtgaggagatggagagcaactgttttgagcatctaaggacgcttttccagttgaggtatttgcgactccacgttagaagtatttctgcactccctgagcagttaggagaactacagcatttgaggactctggatatgggctggacaaagatcacaaaaatgcccaaaagcattgttcagctgcaacatttgacatgtttgcgcgtcagtaatttggaattacctgaagggattgggaatctgcaagctctgcaggagctatcagatatcaaagtcaaccggcacagcacggcgtcttgtttgctggagctgggcagtctgaccaaactgaaaatccttgggctacgctggtcaattgtcagtacacacggtaacgaagacacttttgtggataacttggtatcctcgctgcgcaaactgggcagatccagccttcgatccatatgcattcgtagttatcatggctataccatggagttcttactggactcctggttcccctcccctcatctcatgcaaaagtttcagatgggcacatactacaacttccccagaattcctccttggatcgcgtcgctggacaagctcacatacctagatatcaatatcgatccagtagaagaggaagcactggagatccttggagaattgccttctttgctgtttctctggctgacgtcgaaatcggctgctccgaaacagcggctcgtcgtaagcagcagcatgtttgtgcgtctgaaggagctccacttcacctgctggagcaatgggcaaggactgatgtttgaggccggggccatgccaaggctcgagaagctgtgggttccgttcgacgcaggcagcggtcttgattctggcatccagcacctctcttccctcacgcatcttgccgtcgagatcatttgcgtcggcgcgactgctcgggacgtggaggcgttggaggaggccatcagaggtgcagcccgtctccttccgaaccgccctgcggtggaattccgaacatgggatgatgaaaagatggtggtggaggaggaggaggggcaaggcgtccctgaagaggagatccacgctagcggttga

SEQ ID NO: 398 - DNA, 3921 bp, Nicotiana benthamiana
  source 1..3921: mol_type = genomic DNA
atgttgacttcatcttcccatcatggacgcagttatgatgttttcctaagctttaggggagaagacactagaaaaacatttgtgggtcatctgtttaatgctcttattgaaaagggtattcacacattcatggatgataaggagttaaagagagggaagtcaatctcatctgaactcatgaaagccattggagaatcaagatttgctgttgttgtcttttccaagaactatgcttcctctacatggtgcttggaagaactggtaaagattcttgaaattcatgaaaaatttgagctaattgttgtcccagttttctatgatgtggatccatcaactgtgaggaaacaaaatggggagtatgctgtttgttttactaaatttgaagctaacttggttgatgatagagacaaagtgctaaggtggagggaagcacttactaaggtagctaacatatcagggcatgatttgcgcaacacttacaatggggatgaatcaaaatgcatacaacagatactgaaagacatattcgacaaattttgtttctctatctcaataactaacagagatttagttggaatagaatctcaaattaagaaactaagttcattgttgaggatggacctgaaaggagttcgtcttgttgggatttgggggatgggtggtgtgggaaagacaactgctgcaagagcattgtttaacagatactatcagaattttgaaagtgcttgttttctcgaagatgttaaagaatatctgcaacaccataccttgttgtatttgcagaagactctcctttccaaactgttgaaggtagaatttgtagattgtactgatactgaagaaatgtgtgtaatattaaagaggagactttgttctaagaaagttctggttgttcttgatgatgttaatcataatgaccagctggataagctggtcggagctgaagattggtttggtagtggtagtagaattgttatcacaactagggatatgaaactgttgaaaaaccatgatgtgcatgaaacgtacgagataaaggttttggaaaaagatgaagcaattgagcttttcaatttgcacgcattcaagagaagttcacctgaaaaggagtttaaggagctcttaaatcttgtggtagattatactggaggccttcctttagctcttaaggtgcttggttctctgctgtacaaggaagatcttgatgtatggataagtacgattgatagactaaaagataaccctgagggtgaaattatggctacacttaaaataagttttgatggattaagggattatgaaaaaagtatatttttagatattgcatgtttcttcaggggttacaatcaaagagatatgacagcattatttcacgcttctggtttccacccagttctaggagtaaagacccttgttgaaaaatctctcatttttattttagaggacaaaatccaaatgcatgatttgatgcaagagatgggtagacaaatcgcagttcaagaatcaccgatgagaagaatatatcgtccggaggatgtgaaggatgcatgcataggagatatgaggaaagaagcaattgaaggcttgttactcacagagcctgaacagtttgaagagggtgagttggaatatatgtacagtgctgaagctctcaaaaagacgaggaggctgaggatacttgtgaaagaatattacaacagagggtttgatgagcctgttgcctatcttcctaacagtctgctttggcttgaatggcgtaactactcttcaaactcatttccatcaaattttgaaccgtcaaagctcgtatatcttactatgaagggtagttctatcatcgaactctggaatggtgcaaagaggttagcatttttgacaactcttgatctcagttattgccacaaattgatacaaaccccagattttaggatgatcacaaatttggaaaggttgatcctgagctcttgtgatgcattggtggaagtccatccatctgttgggtttctcaagaatcttattttgttaaatatggatcattgcatatcacttgagagacttccagcaattattcaatcagaatgtcttgaagttcttgatctcaattattgctttaacttgaaaatgttcccggaagtggaaaggaatatgacgcacttgaagaaactcgacctcacttcaactgggataagagaactgccggcatcaattgagcatctcagttccctggaaaacctacagatgcattcctgcaaccaacttgtaagtctccctagtagtatttggagattcagaaatctgaagattagtgaatgtgagaaactggggagtttaccagaaattcacgggaatagcaattgtacccgtgaactcatcttaaaattagtttcgattaaggagcttcccacctctataggaaacctcacctcactaaatttccttgaaatctgtaattgcaaaactatttcgagtctctcgagcagcatatggggattgacaagtcttacaactctaaagttgttagactgcagaaaacttaaaaacttgcccggaattcccaatgccataaatcatttgtcaggacatggacttcagctccttctgacattggagcagcccacaatttatgaacgccttgacttgcttaggattattgatatgagctggtgtagttgtattagcagtctcccccacaacatttggatgttgaaatttttaaggattctgtgcatctcttactgctcgagactggagtatttaccagaaaatttgggtcacttggaacatttggaggaattacttgcagatggtactggtattttaagactaccatcttcggttgcacgtttaaataaacttgaggtcttatcattcaggaaaaagtttgcgattggaccaaaagtccaatattcatcatcaatgctcaatttacctgatgatgtttttggaagtcttggaagcttaggctcagtggtgaagttaaatcttagtggaaatggtttttgtaatttgcctgaaacgatgaatcaacttttttgccttgaataccttgatataacattttgccagaggctcgaagcattgccagagcttcccccaagcatcaaggagctatatgtagatgaacacttggccttgagaatcatggaagatttagtaattaaatgcaaggagttgaatttaatagccgtcacaaaaattgagtaccaaaatttctatcgatggttagactcaatatggtcagatgtgtcagaactgctggagaacagtcagaagcaacaactggatgatatgttgcagcttattcccttttcatatctgtcgacggctaagcgtgaggaagttcttaagattgttatccatggaacacgaattccagaatggttcagatggcaagatagaagtgccacaacgatgtcagtcaaccttcctgaatattggtacactgaaaatttcttgggattcgctatatgctgcagctgctgcttttatcattctgcacgtagttacgatgttgaatttgaggggagcatgcatcattacaattatgattccagttattggaaagagtatgaggaaccaagttatgacttttatgagagagatagcattgagattacagcaaaactaactccccgacataaaggaatgcggactgaagagctcaagaaagtctgttcattttccatgaatgtgttacgtcgtgctactgctgtccctaatatgtgctttgcattttttccatttaacagtctctgtcacatatcaaatttacaggcaaataacccaaatgactatgggatatttgaaacctgtttgagtccaggggacatccgccatcgtggaaaacaatgggggtttaatttggtgtataaagatgaaactggtggcagtgttacacacgaaatgctcataaacagatag

SEQ ID NO: 399 - DNA, 2538 bp, Nicotiana benthamiana
  source 1..2538: mol_type = genomic DNA
atggtggatgcggtggtcactgtattcttggagaaacttctgcatgttctcacagaggagagtaggtttcttactaaatacagacagcagtttgaaaaactgaagaacgagctgctattcatgcaaagctttctcaaagatgcagagaggctcaagaggaaaaacaacacccttaaaggggtcatgtcctgtttgcgagacttaatctttgaagctgaagagatacttgaggactgccagaatcaatctgcagatagcgatcgggctactacatgcttccatcctaaaaggctctctcttcgccatcaaactgggaagtgccttgctaaaatcaatgacagaatctcggagataaagcaaaacatttcaacatatcttggagtaccacttctcgaagaaggaagtatggaggcacacaataatctaatgtcaagatggacttcttccctttatgaccacactcaggtagttggtttggaaggtgacactgagaagataaaggattggctatttgaagcaagagatggtttacttaccattgcatttgtgggtatgggaggacttggtaaaaccactcttgctcagaaagtcttcaatgacaaaagggtggaggatcacttggagaggaggatttgggtgtctgtttctcaaacatttactgaggaacaagtcatgagaagcatattgaggagtttaggagatgcatgtgttggtgatgaccagtgtgaactgttaagaaaaataaaccagtaccttttgggaaagaggtttttgattgttatggatgatgtttggagctgggacaatgcctggtggcaaaaaatctatactggactgcccaaaggaaatgggagcactgttattgtaacaacgagaaatgagctagtcgctcgcaagatgggagttacagaagcaagaatacattggccaaaattcctcaatgagcactacagttggttactattccggaagattgcatttgcaggaagtgcaggtgaatgccatttccccgagttggaggacgtgggaaaggagattgtggaaaaatgcaagggtcttcctttagcaatcaaagcagtaggaggagtgatgctttgcaagccatcttactatcacgaatggaggcgtatttcaaatcatttccgtgatgaattgaaagaaaatgatgactcagtgatggcctcactacagttgagctatgatgaactccctccttacttgaaatcctgtttcctctgtttttcactatttcctgaggattgtgtcataccaaaagaccaactgatccgttggtggattggagaaggtttcatacctctgagaagtggtaggttatcgactgaagtgggagaagattgtttctcacaactatccaatcggtgtttgatagaagttgttgataaggcttacaatggtgtgatccacacatgcaaaatgcatgacatggttcgtgacttggtgatcaaattagccgaggatgatgcatttttcaccccagctgatgcaacttgtcggcatttgggtattaagagtgagatgaattggaagcaactattgagcaatcaaaaattacgagcactgctaacaaccaccaagagtggtgaagttaacaaaatccattccgacattgccaagaagctgtgcaagagtcgacacctccaagtattggatctgtcaaaatcaattttcgatgtgcctctttcaagtttgttggaaggaattggatctgctaagcagctcacttatctcagtttaagcaatacacatccaatgattggagttccagcttccatatccaagcttgaaaaattacagattttggatttcagctattgccaaaatatgaaaatgctcccctcttgcgttctgacatttgaggaacttgctgttttggatgtgaacaactgtggttcccttgagtaccttccaaaaggattaagtaggctttccaatcttcaagtattgcttgggtttaagcctgcaaaattaagccaaccaggaggttgtcgtattgctgagctcagaagcctgactcgactcagaactctcagtttaagactaaccgaaaatgaggagattggagacgatgaggggaacgcactggtagatctccaagaacttcaatttttaacaataagttgctttggcagtcaagataatggacttgcgacaaaacttggtagactttatcctccacgacaactccacgagctgattctcaaattttatccaagtaagacaagtcctgaatggcttaaccccaatctctcccccatgttgcgatatttatcaatcatctctggtgatattacacaaatgcacgagaacttctggggtgatggtagtactgcttggaaaattgagggcttaatgttggaatctttatcggatttgagattggaatggtcagcaatgcatcaagtcatgccttcgttaagaatactcaaggttagctggtgccctgagttggagtcatttccaattgaagatgcagggtttagagggggtctatggaagaaggaagaacataggaactga

SEQ ID NO: 400 - DNA, 8394 bp, Oryza sativa
  source 1..8394: mol_type = genomic DNA
tcctcgagggtatagaccatatttcccctggtttccattgatgtggcatatatcagggcccactacctcaaccatcaccacgtccagtcctttcggcctgttcgcgatgacgagctcggccaccacctcaacatcgtccatgctgcggcgatggcgaggagacagctgggacggtgaacctcatagctccgtctgttgcaacatcctctcgccatgctcacgtcgccacgacacccttgtcctcctgctccgtagcagcctcgcaagctcacgccgcggcctcgtcgaggtcctctgtccccgagccgcttctagcatcgatgagctgaggaactccccactgccgaggcgatgacgatttggcagggagggctcgattcgcccactccaattcgcagcttcacacctcccctccccctcctattcatccaccaccaacgcggataggagaagggatagaggaaggtgtgcgtggacacttacatgttggtcccatatattttttttactcggatgccacgtcagataaaacaaccgtcggtcaacatttttcgtattgcggattaggaacgtcattcatgactcgacgcagagctgagggatggcaagtgaacttattcccataaaacttccaaaagtttggaatgctcaacttgggcttctcttcggatgctgaagtgctaatgggccaaataaccaactagcccacagcccatcgaagtggaagccgacgagtccaccgtcaacgcggcagtagtaatccgagaaaacgcgggtcgcgcgaagcaatcgatcatcatcagacgattaatccacgacgaccaggagcgctgccccgagccacacgcccacacgcactggtgaatcttctcctttccacctagttttcactctgcagtctcctctcctagctactactctgccttcccatcctcgcttgttgcagccctcttgcacacgccattggccacagtccaaggactgctcctgttccgatggaggaggtggaagccggtttgctggagggcgggatcaggtggctggcggagaccatcctggataacctggacgccgacaagctggatgagtggattcgccagattaggctcgccgctgacaccgagaagctacgggctgagatcgagaaggtggatggggtggtcgctgccgtgaaggggagggcgatcgggaacaggtcgctggcccgatctctcggccgtctcagggggttgctgtacgacgccgacgatgcggtcgacgagctcgactacttcaggctccagcagcaggtcgagggaggaggtactgtctttgcatatatccgtgccttttaattaagtttgcaagctgcgttgcctgcaacaatggcgtattggcgtcagtttccaatccatgcttgtgctacagttactacacggtttgaggctgaagagacggtcggagatggagcagaggacgaggacgatattccgatggacaatactgatgtaccggaggcagtggcggcaggcagcagcaagaaacggtccaaggcatgggaacactttactaccgtagagttcactgctgacgggaaggattctaaagcacggtgcaagtactgccacaaggacctatgttgcacatctaagaacgggacatcagctttgcgcaaccatctcaatgtttgcaagaggaaacgtgtaacaagtactgaccaaccggtaaatccatcaaggtaatgctaatggagttctgaatttagtgtaaatccgttgaagtgtaaatttggcccgttacatctgcttaagatctcattctgtctctaatcttctaatagccaactcatggtcattttttttcctaatatatagtaccggtgatggtgcaccaaatgtaattagatgcaaggaaacaaaagtgaacaattgtatatatcaaatataattatatctaaaacatgagtagtgtatcaaatccaattctttcaaaaatctactatgcaaaattgagtgacaaaatctgctgccttttttttttacagaaagcaaccaattaatataagtcaaatataaaaacgctttgtagtctccaataaaatagctcattgtttcgtttatacttatgtttataaatttaaatttaaaacttaattttggagttgattttgtggttttcttttcatcctattttattttacaacatttgattttgaatagttaagaatgcgtatataaaaattttacccataagttattttttaaattgttaataaatcgtaaggataatcataagtataagtgaaacgattcgctcttcatctacttaagattgcgttatattgctgacctttctaatcgcctaaccacgatcacatgctcttccagtgccggtgagggtgcatcaaatgcaactggtaattcagttggcagaaaaaggatgagaatggatgggacttcaacacaccacgaggcagttagcacgcacccttggaacaaggctgaactttccaacaggatccaatgcatgactcatcagttagaagaggctgtaaatgaggttatgaggctatgtcgatcctcaagttcaaaccagagtcgacagggtacaccaccggccacaaatgcaacaacatcgtcttatcttccggagcccatagtgtatgggagggctgcagagatggaaaccatcaaacagctgatcatgagcaatagatctaatggcataaccgtcctgccaattgtaggcaatggagggataggaaaaaccactttggcgcaactggtctgcaaagatctggtaattaaaagtcagtttaatgttaagatatgggtgtatgtatctgataaatttgatgtagttaagattacaaggcagattttggatcatgtctccaaccagagccacgaaggaataagcaaccttgatacgcttcagcaggatcttgaggaacaaatgaaatctaagaagttcctcattgtcttagatgatgtgtgggaaatccgtacagatgactggaaaaaactactggctcctttaagacctaaagatcaggtgaattcgtcacaggaagaggcaacaggtaatatgataattttgacaactcgtatacagagtattgccaaaagtcttggaacagtacaatcaattaagttagaagctctgaaagatgacgatatatggtcactatttaaagtgcatgcttttggtaatgataaacatgatagtagtccaggcttacaggttcttgggaagcaaattgctagcgagctaaaaggcaacccactggcagcaaaaactgtgggttcactattaggaacgaatcttaccatcgatcattgggatagcattataaagagtgaagaatggaaatccctgcaacaagcttatggcatcatgcaagcgctgaagttgagctatgatcatctatccaaccccttacagcaatgcgtctcttattgttctcttttccccaagggttattctttcagcaaagcacaactaatacaaatatggattgctcaaggatttgtggaagaatccagtgagaagttggagcagaaaggatggaaatatctagctgagttggtaaattcgggtttccttcagcaagttgaaagcacacggttttcatcagaatattttgttatgcacgatcttatgcatgatttagcgcaaaaggtttcacaaacagaatatgcaactatagatggctcagagtgcacagagttagccccaagtatacgccatttgtcaatagtaactgattctgcataccgcaaggagaaatatagaaacatatctcgtaatgaggtgtttgagaaaaggttgatgaaagttaagtcaaggagtaagttgaggtcactggtattaattgggcaatatgattctcatttttttaaatatttcaaagatgctttcaaggaagcacaacatctgcgactgctgcagatcactgcaacttatgctgattctgattcatttctctccagtttggtaaattctacacatctccggtatctgaaaattgtgaccgaagaatccggcagaactttgccccgatctctaaggaagtattaccatcttcaagtactagatattggctatagatttggaattccccgtatatctaatgatataaataatcttctcagcctgcggcatcttgttgcatatgatgaagtgtgttcttccattgctaacattggtaaaatgacctcacttcaggaactaggcaattttattgttcagaataatttaagtggttttgaggtgacacaattgaaatccatgaacaagcttgtacaacttagtgtgtctcagcttgaaaatgttagaactcaggaggaggcatgtggggcaaaactgaaagacaaacaacacttagaaaagctacatttgtcctggaaggatgcatggaatggatatgacagtgacgaaagctatgaagatgaatacggcagtgatatgaatatagaaacagaaggggaggaactgtcagttggtgatgccaatggtgcccaaagcttacaacatcacagtaatataagctctgaacttgcttcaagtgaggtgctcgaaggtcttgaaccacatcacggcctcaagtatctacggatatctgggtataatggatctacctccccaacttggcttccttcttcacttacctgtctgcaaacacttcatctagaaaaatgtggaaaatggcaaatacttcctttagaaaggctagggttacttgtaaagctcgtgttgatcaaaatgaggaatgcaacagaactctcaatcccttcactggaggagcttgtgttaattgcattgccaagcttgaacacatgctcctgcacttccatcaggaacttgaactccagtttaaaggttctgaaaattaagaattgccctgtactgaaggtatttcccttgtttgagatttcccagaaatttgaaatcgagcggacgtcgtcatggttgccccatcttagcaagcttaccatctataattatcctctttcctgtgtgcacagttctctgccaccttccgcaatcagtggttatggagaatatggaaggtgtacccttccgcaatcacttgaggaactttacatccatgagtattctcaagaaactctgcagccctgcttttcagggaacctcactctcctgagaaaattacatgtactgggaaactcaaatttagtgtctctgcagctccattcctgcacagcactcgaagagttgataattcaaagctgtgagtctcttagttctctggatggcttgcaattgcttggcaatctcaggttgctgcaggcacatagatgcctcagtggtcatggagaagatggaaggtgtatccttccgcaatcacttgaggaactttacatccatgagtattctcaagaaactctgcagccctgcttttcagggaacctcactctcctgagaaaattacatgtactgggaaactcaaatttagtgtctctgcagctccattcctgcacagcactcgaagagttgataattcaaagctgtgagtctcttagttctctggatggcttgcaattgcttggcaatctcaggttgctgcaggcacatagatgcctcagtggtcatggagaagatggaaggtgtatccttccgcaatcacttgaggaactttacatccatgagtattctcaagaaactctgcagccctgcttttcagggaacctcactctcctgagaaaattacatgtactgggaaactcaaatttagtgtctctgcagctccattcctgcacagcactcgaagtgttgataattcaaagctgtgagtctcttagttctctggatggcttgcaattgcttggcaacctcaggttgctgcaggcacatagatgcctcagtggtcatggagaagatggaaggtgtatccttccgcaatcacttgaggaactttacatccatgagtattctcaagaaactctgcagccctgcttttcagggaacctcactctcctgagaaaattacatgtactgggaaactcaaatttagtgtctctgcagctccattcctgcacagcactcgaagtgttgataattcaaagctgtgagtctcttagttctctggatggcttgcaattgcttggcaatctcaggttgctgcaggcacatagatgcctcagtggtcatggagaagatggaaggtgtatccttccgcaatcacttgaggaacttttcatcagtgagtattctctagaaactctgcagccctgcttcctgacgaatctcacctgcttaaaacaattaagggtatcaggcaccacaagtttcaaatctctagaactgcaatcatgcactgcactcgaacatttgaagattcaaggttgtgcgtcgcttgctacattggaggggttgcaattcctccacgccctcaggcatatggaagtattcagatgccctggcttgcctccatatttggggagttcgtcagagcagggctatgagctatgcccacgactggaaaggctcgacatcgatgacccctctatccttaccacgtcgttctgcaagcacctcacctccctccaacgcctagagcttaactattgcggaagtgaagtggcaagactaacggatgagcaagagagagcgcttcagctcctcacgtccctgcaagagctccggtttaagtattgctacaatctcatagatcttcctgcggggctccacagccttccctccctcgagaggttggagatccggagttgcaggagcatcgcgaggctgccggagaagggcctcccaccttcgttcgaagaactggatatcatcgcttgcagtaatgagctagctcagcagtgcagaactctagcaagcactctgaaggtcaaaattaatgggggatatgtgaactgattactcggtggcttgttaggcgcacctttttccacctgcccaactggcgtgggctcgttcaggcgttcaagctgctgtaaattccattgccgcaatgacgaccttcagaaccgttacacaatacaaaggacatatgatggctagatcaactgtcgcagagctagctttggttcacctgaaaacataaggccaaacgcgtggttcttttaatcagaagtatcaaaaattggttttggtttttaacgaaaagatgttagaaattggttttaatgtgccagattctgtaccagaattctgtattttgctccgtaattctgtgctacgactgatgttgtatttaactgatagcaatcgaccggcaaaaccaatccgctccaatgcattgtcacatacaaattctataattctatctactgaaaaggatgattgctgttcattttcgtgattacagaaggaactgtgtatatcgtgctatttttgcattcacattgtgtcccaggttgtgctcggatcagccaatttcggtggttaattcactttgttgtgtcctctgtgcactcaagaattgttcgcacatgcaattcagttgagcatcgcactacgcaagttttttttgttaacaaaggagtggttgacagcattgcaggttgctaaaaccgtgtcaaaaatttgctaacaaaagaattctcttcagaaatagtatgaaaataaatgccacataagtaatctgagtaaaacagacagaatcactagagaagactaacgacaaaatcttctttttcaatttctgtggtgaaaaactcactaactccgcatataatctcatgtatgcattggaggtgcataccatttcgatcatgtatgcatttagctgaacattatcaagaagcaaatttattgcacgggcaaacataagctaaactaattctcaagcaatttaataatcacaaaacagtctgcaataccaagatatataaaacttttgccagcatggagcaacaacaccgaaacactacaatcaagacagctcccagaaaagattatatgttgctacttcaattgccacagttacaatcacccataatgacacatcaaattacataagagtattaagagtatatgacagttgtaacaaaacaactgcattgagaactagaacagacagccacatgaaccatattcacttcttcagatcagaaagcctggtgaactaccagtctaccaattgctaccgtagtctccatttttcacttatatgtacataggacacctgcgctatcagaatagccacaaagccagttcactcgctacaaattaatcttgactaaatccaaacagataccaactcctcttaatcaacttacaaaacacctacacttttggtgtctctacaccaccaatcacacaaaaggaaattaatcatccaccaactcgtatcctactgttagaatggaggccttacaccagagaatgggcattgccagattctgagacactgtcctttgagctccctga

SEQ ID NO: 401 - DNA, 3441 bp, Solanum lycopersicum
  source 1..3441: mol_type = genomic DNA
atggcatcttcttcttcttcttctgcaagtaattcaaagtattatcctcgatggaagtacgttgtttttctaagtttcagaggtgaagacactcgaaaaacatttacaggtcacttatacgaaggtttgagaaatagaggaataaacacatttcaagatgataaaagactagagcatggagattcaattccaaaagaactcttgagagctatagaagattctcaagttgcacttatcattttctcaaagaattatgctacatctaggtggtgcttgaatgaactagtgaagatcatggaatgcaaagaggaagaaaatggacaaacagtcataccgatcttttataatgtggatccatcacatgttcgataccaaactgaaagctttggagcagcatttgccaaacacgaatcaaagtataaggatgatgttgaggggatgcagaaggtgcaaagatggagaactgccctaactgctgccgcaaatctaaaaggatatgatatccgtaacgggattgaatcagagaatattcagcagatcgtagattgcatctcttccaaattttgtacgaatgcttattctttatcttttttgcaagatattgtgggaataaatgctcacttagagaaactaaaatcgaaacttcaaatagaaatcaatgatgttcggattttagggatctggggaataggcggagtcggtaaaacaagaatagcaaaagccatttttgatactctatcttatcaatttgaagcttcttgttttcttgctgatgttaaagaatttgcaaaaaagaataaactgcattctttacaaaatattcttctctctgaactgttaaggaaaaaaaatgattacgtctacaacaagtatgatggaaagtgtatgattccaaacagactttgttctttgaaggttctaattgtgcttgatgatatagatcatggtgatcagatggagtatttagcaggtgatatttgttggtttggtaatggcagcagagttattgtaacaactagaaacaaacatttgatagagaaagatgatgcgatatacgaagtgtctacactgcctgatcatgaagctatgcaattattcaatatgcatgcttttaaaaaagaagttccaaatgaggattttaaggagttggcgttagagatagtaaatcacgctaaaggcctccctttagccctcaaggtgtggggctgtttattgcataaaaaaaatctctctttatggaaaataacagtagagcaaataaagaaagactctaattcagaaattgttgaacaactcaaaataagttatgatgggttggagtccgaagagcaggaaatatttttagatatagcatgtttcttccgcggagagaaaagaaaagaggtcatgcaaattcttaagagttgtgactttggagctgaatacggattggatgttctgattaataaatctcttgtgttcatatctgaaaatgacaggattgaaatgcatgatttgattagagatatgggtagatatgtggtgaaaatgcaaaagcttcagaaaaaacgtagcagaatatgggatgttgaagatttcaaagaagtgatgatagactatacggggaccatgacagtggaagcaatctggtttagttgctttgaagaagtacgttttaataaggaggcaatgaaaaaaatgaaaaggcttaggatattacacatatttgatggttttgtcaaattcttctcttcgcctccctcttccaattccaatgattcagaagaagaagatgattcctacgacttagtcgtagatcaccatgatgactctattgagtacctgtccaataacttgcgttggttagtctggaatcactattcttggaagtcattgccagaaaattttaaaccagaaaagcttgttcatcttgaactccgttggagttcgcttcattatttatggaagaaaacagagcatttgccgtctctacgaaagctagatctcagcttatctaaaagtctggtgcaaacaccagatttcacggggatgccaaatttggagtatttgaatctggagtactgtagtaagcttgaagaggttcactattccctagcatattgcgaaaaactcattgagttaaatttgagttggtgtacaaagcttaggagatttccatatattaacatggaatctcttgaatctctggatctacaatattgctatggtataatggtgtttccagaaatcatcggaacgatgaagccggagttaatgattctctcagcaaacactatgataactgaactaccatcatctcttcagtacccaactcatctcacagagctagatttgagtggcatggaaaaccttgaagctcttccaagcagcattgtcaagttgaaagatttggtgaagctaaatgtgtcgtactgcttaacgcttaaaagcttgcctgaagagattggtgatttagaaaacttggaggaacttgatgcttcgcgtactctaatttcacagcctccatcttccattgtccgcttgaacaagcttaaatccttgaagttaatgaaacgaaacacattaacagatgatgtgtgctttgtgtttcctcctgtgaataacgggttactctcattggaaattctggagctcggttcctccaatttcgaagatggaagaattccggaagatattggatgtttatcctctttgaaagagttacgtctcgagggagataatttcaatcatttgcctcaaagcatagcccaacttggtgcacttcgattcttatacataaaagattgcaggagtcttacaagtctgccagaatttccaccgcaattagatacaatatttgcagattggagcaatgatttgatctgtaagtcactgtttctaaatatctcatcattccaacataacatctctgcttcagattcgttgtcgttaagagtgtttacgagtttggggagtagtatcccaatctggttccaccatcagggaacagatacaagtgtttcagtcaatttgcctgaaaactggtatgtatcagataacttcttgggattcgctgtatgttactatggcaatttaactgagaacacagctgaattgattatgagttctgcagggatgccatgtatcacctggaaacttttgttatcgaatcattcagaatgtacatatattaggattcattttttcttggtaccttttgctggcttatgggatacatctaacgccaatggtaaaacaccaaatgactataagcacattatgttatcttttcctcaagaattgaaggagtgtggagttcgtttgttctatgaagatgaatctgtgcttgagaccaccaatgatgaacttaccattggggtaaggaggatcagatacgacgacgacgatagtgaacattatgaggaggctggttgttcctcttctaagaaacaaagatcataa

SEQ ID NO: 402 - DNA, 2718 bp, Zea mays
  source 1..2718: mol_type = genomic DNA
atggcagagattgctgttcttctcgtcctgaagaagattgccatagctctggcaggagagaccctaagttttgctaaaccattgcttgcaaagaagtctgagtcggtggcagcactcccagatgacatgaaactgattagtaatgagctcgagcttatccgggcgtttctcaaggaaatcggcaggaaaggctggaaaagcgaagtgatagaaacatggatagggcaggtccgaagactggcttatgatatggaagacactgtagaccattttatttacgttgttggtacacacgatcagatgggatcatgctgggattacatgaagaagatagccaagaagcctcggcgtctggtttcactagatgaaattgctagtgagattaagaagataaagcaagagcttaaacaactctcggaaagtagagaccgctggactaaacccttggatggcgggagtggtatacctgcaggaagctatgaaactgaaaaggaaatgtatcttcctggacatgattacacaatcagcgacgaggagcttgcaggaattgatgaaaataagcaaaccttgattagttcattaaaatttgaagatccatcacttcggatcattgctgtctggggtatgggtggcgttggaaaaagcactcttgtaaataatgtgtacaaaaatgaaggatccaactttgactgccgtgcatgggtttctatctctcagtcatatagactagaagatatatggaagaaaatgctgacagatctcatcgggaaagataagatagaatttgatcttggaacaatggatagtgcagaactaagagagcaattgacaaaaactctagacaaaaggcagtacctgatcatactggatgatgtctggatggctaatgttttttttaaaattaaagaagttcttgtagataatggccttggaagcagagtaataatcacaacaagaattgaggaggtagcttcactagctaagggtagttgtaagatcaaagtagaacctctgggtgtcgatgattcctggcatgtattttgtaggaaggcatttctgaaagatgaaaaccatatctgccctccagagttgcgtcagtgtggtataaacattgtggagaaatgtgatggtttgccattagcccttgtggcaataggaagcatattgtcgctgagaccgaagaatgttgacgagtggaagctattttatgaccagcttatctgggagctacacaacaatgagaaccttaatcgcgtggagaaaattatgaatctaagttataaatacttaccagactatttgaagaactgcttcctgtattgtgctatgtttccagaagactatctaatacacagaaagagattgattagattgtggatagctgaaggatttattgaacaaaaaggggcatgcagcttagaagacactgctgaaagttatcttaaagaacttatacgacggagcatgcttcacgttgcagagaggaactgctttggtaggattaaatgtattcgaatgcatgatcttgtgcgtgaacttgccattttccaatctaaaagagagggtttcagtacaacttatggtggaaataatgaagcagtgctagtgggatcatattctcgacgagtggctgtgctccaatgcagcaagggcattccatcaaccattgatccatccaggcttcgcaccttaattacattcgacaccagcagagcattatctgtgtggtattcttctatttcctccaaaccaaagtaccttgcagtattagacttatcaagcttgcctattgagactattccaaattcaattggagagcttttcaaccttaggcttttatgcctcaataaaaccaaagtgaaagagctccctaaatctattacaaaacttcaaaacctacagacaatgagtcttgagaatggggagttagtgaagttcccacaagggttttcaaaactgaagaaattgcgacatcttatggtttcacggttgcaagatgtaactttcagcggtttcaaaagttgggaagctgtggagccatttaagggcttgtggactttgattgaactgcaaactctgtatgccattacagcaagtgaagtattagttgcaaaacttggaaatttatcccagctgaggcggcttataatttgtgatgtaaggagtaacttatgtgcacagttgtgtggctctttgtcaaagttgtgccagctgtcacgattaacgataagagcatgcaatgaagatgaagtgctacagctggatcatttgacatttccaaatcctcttcaaacccttagtttagatggacgactgtcagaaggaactttcaaatctccctttttcttaaatcatggaaatgggcttcttaggctaatgttgttttacagtcagctttcagaaaatccagtaccacacctctctgaattgtcaaacttgactaggttatcccttataaaggcatacaccggccaagaattatacttccaagcaggttggttcctgaatttaaaagaactttacttgaagaatttgtcccggctcaatcaaatagacatacaggagggagctttggccagccttgaacgtataacaatgaaacacctcccggagctacgggaggttccagtcggtttcagatttctcaagtccctaaaaacaatatttttttccgatatgcatcctgagtttgaaagcagctttcaaaaggaaatgtag

SEQ ID NO: 403 - DNA, 1005 bp, Oryza sativa
  source 1..1005: mol_type = genomic DNA
acattggtagtagtgcaatgtcagagcttcaatcactgccagacctcaatagactatcactagtgaaccttgaaaaggtttcagacactgaagatgcaagaatggcaaaacttcaagagaaagaaaagctcgagacattgatgttgaggtggaatatggatgctggaaatgccagtagaatagatcatgaagtacttgaaaccctccaacctagccagtgcctgaaaactttggagattgttgcgtatgaaggatatgtatttccatcttggatgacaagaaccgagccatatcttacatctctggttgagataagactagttaatatgagagcatgtgaaaaggcattacctccacttgggatactaccatgtctgaagattgcagagataagtggagttgataatctcagttctattggtgataatttctatggtcataacggcacattcccttcactggagaagctgattctatcatacatgacaagccttgaagtctgggaacagtcatctaggatgaatctgtttcctcgtcttgcagaacttgtcatcattcagtgcccaaaattgagagcactgcatatggagtttccatcgattgaaaagttgattttgtggatgaataacaagatgttgtacagctcgaaggaaggtatgagaggtgtagagaagagcctcgaaaatctttcaatttctttctgtgaagagttgcatgcttcttcaggctgtgagggtctacaggctcttgatcgcctcaagaagttggagatatgtggttgtcatgaattatcatgcctcccacagggtttgcagcatctttcctctctcaccagcttgaaaattgataactgcaacaaattggagattttgccagaatggttggagaacctaccttttctacagataatgtgtttgtctggctgtccaattctgcactccattcctgaaggcctaacatgtagcgacattattgttgaagattgccccaattttaaagaaccat

SEQ ID NO: 404 - DNA, 3102 bp, Oryza sativa
  source 1..3102: mol_type = genomic DNA
atggcggagacggtgctgagcatggcgaggtcgctggtgggcagtgccatcagcaaggccgcctctgccgctgccaatgagacgagcctcctgctgggcgtcgagaaagacatctggtatatcaaagatgagctaaaaacgatgcaagcattccttagagctgctgaacttatgaaaaagaaagatgaactattaaaggtttgggcagagcaaatacgtgacctgtcatatgacattgaagattcccttgatgaatttaaggtccatattgaaagccaaaccctatttcgtcagttggtgaaactcagagaacgccaccgaattgctatccgtatccacaaccttaaatcaagagttgaagaagtgagtagcaggaacacacgctacagtttagtcaagcctatttcctctggcacagagattgacatggattcctatgcagaagacattcgtaatcagtcagctcgcaatgtggatgaagctgagcttgttgggttttctgactccaagaaaaggctgcttgaaatgatcgataccaatgctaatgatggtccggccaaggtaatctgtgttgttgggatgggtggtttaggcaagacagctctttcgaggaagatctttgaaagcgaagaagacattaggaagaacttcccttgcaatgcttggattacagtgtcacaatcatttcacaggattgagctacttaaagatatgatacgccaacttcttggccccagttctctggatcaactcttgcaagaattgcaagggaaggtggtggtgcaagtacatcatctttctgagtacctgatagaagagctcaaggagaagaggtactttgttgttctagatgatctatggattttacatgattggaattggataaatgaaattgcatttcctaagaacaataagaagggcagtcgaatagtaataaccactcggaatgttgatcttgcggagaagtgtgccacagcctcactggtgtaccaccttgatttcttgcagatgaacgatgccataacattgctactgagaaaaacaaataaaaatcatgaagacatggaatcaaataaaaatatgcaaaagatggttgaacgaattgtaaataaatgtggtcgtctaccattagcaatacttacaataggagctgtgcttgcaactaaacaggtgtcagaatgggagaaattctatgaacaccttccttcagaactagaaataaacccaagcctggaagctttgaggagaatggtgaccctaggttacaaccacctaccatcccatttgaaaccatgctttttgtatctaagtatctttcctgaggattttgaaatcaaaaggaatcgtctagtaggtagatggatagcagaagggtttgttagaccaaaggttgggatgacgactaaggatgtcggagaaagttactttaatgagctaatcaaccgaagtatgattcaacgatcaagagtgggcatagcaggaaaaattaagacttgtcgaattcatgatatcatccgtgatatcacagtttcaatctcgagacaggaaaattttgtattattaccaatgggagatggctctgatttagttcaggaaaacactcgccacatagcattccatgggagtatgtcctgcaaaactggattggattggagcattattcgatcattagctatttttggtgacagacccaagagtctagcacatgcagtttgtccagatcaattgaggatgttacgggtcttggatcttgaagatgtgacattcttaatcactcaaaaagatttcgaccgtattgcattgttgtgccacttgaaatacttgagtattggatattcgtcatccatatattcacttcccagatccattggtaaactacagggcctacaaactttgaacatgccgagcacatacattgcagcactaccaagtgagatcagtaaactccaatgtctgcatactcttcgttgtataggacagtttcattatgacaactttagtctaaaccacccaatgaagtgcataactaacacaatatgcctgcctaaagtattcacacctttagttagtcgcgatgatcgtgcaaaacaaattgctgaattgcacatggccaccaaaagttgctggtctgaatcaatcggtgtgaaggtacccaaaggaatagataagttgcgagacttgcaggttctagagtatgtagatatcaggcggaccagtagtagagcaatcaaagagctggggcagttaagcaagctgaggaaattaggtgtgacaacaaacgggtcgacaaaggaaaaatgtaagatactttatgcagccattgagaagctctcttccctccaatctctccatgtggatgctgtgttattctcaggtattattggaacacttgagtgcctagattctatttcatctcctcctcccctactgaggacactcgtgttggatggaattcttgaggagatgcctaactggattgagcagctcatgcacctgaagaagatctacttattgagcagcaaactaaaggaaggtaaaaccatgctgatacttggggcactgcccaacctcatggtccttcatctttatcggaatgcttaccttggggagaagctagtattcaaaacaggagcattcccaaatcttagaacactttggatttatgaattggatcagctaagagagatcagatttgaggacggcagctcacccctgttggaaaagatagaaataggcgagtgcaggttggaatctgggattactggtatcattcaccttccaaagctcaaggagattccgattagatacggaagtaaagtggctgggcttggtcagctggagggagaagtgaacgcacacccaaatcgccccgtgctgctaatgtacagtgaccgaaggtatcacgacctgggggctgaagccgaaggatcttctatagaagtgcaaacagcagatcctgttcctgatgccgaaggatcagtcactgtagcagtggaatcaacggatccccttcccgagcaggaggagagagctcgcagtcgcaggtgatcacgttgacgacgaatgatagcgaagaagataggcacagctcaagctggctga

SEQ ID NO: 405 - DNA, 4288 bp, Oryza sativa
  source 1..4288: mol_type = genomic DNA
caccgagtgtgagcggcaacggcggtcagggagcaggcgtggctcgtcggcgagcggctacgggcaacggcgccttggcgtcaggcatccgccgtcactcacctcaagcttgcgggctctgcgaccaccctctcatagtcataggccacagaagcacatttgccttgtgcgtgctgttcgtctgttccactcgtgaacatcagacgcgaagattatagattcacccctgttcacagattcaggtctgtcacgaggcgtatgatcatcaactctgccacaaaatccattcaaaaatagaacagagcaatggaggcgacggcgctgagtgtgggcaaatccgtgctgaatggagcgcttggctacgcaaaatctgcatttgctgaggaggtggccttgcagcttggtatccagaaagaccacacatttgttgcagatgagcttgagatgatgaggtctttcatgatggaggcgcacgaggagcaagataacagcaaggtggtcaagacttgggtgaagcaagtccgtgacactgcctatgatgttgaggacagcctccaggatttcgctgttcatcttaagaggccatcctggtggcgatttcctcgtacgctgctcgagcggcaccgtgtggccaagcagatgaaggagcttaggaacaaggtcgaggatgtcagccagaggaatgtgcggtaccacctcatcaagggctctgccaaggccaccatcaattccactgagcaatctagcgttattgctacagccatattcggcattgacgatgcaaggcgtgccgcaaagcaggacaatcagagagtggatcttgtccaactaatcaacagtgaggatcaggacctaaaagtgatcgcggtctggggaacaagtggtgatatgggccaaacaacaataatcaggatggcttatgagaacccagatgtccaaatcagattcccatgccgtgcatgggtaagggtgatgcatcctttcagtccaagagactttgtccagagcttggtgaatcagcttcatgcaacccaaggggttgaagctctgttggagaaagagaagacagaacaagatttagctaagaaattcaatggatgtgtgaatgataggaagtgtctaattgtgcttaatgacctatccaccattgaagagtgggaccagattaagaaatgcttccaaaaatgcaggaaaggaagccgaatcatagtgtcaagcactcaagttgaagttgcaagcttatgtgctgggcaagaaagccaagcctcagagctaaagcaattgtctgctgatcagaccctttacgcattctacgacaagggttcccaaattatagaggattcagtgaagccagtgtctatctcggatgtggccatcacaagtacaaacaatcatacagtggcccatggtgagattatagatgatcaatcaatggatgctgatgagaagaaggtggctagaaagagtcttactcgcattaggacaagtgttggtgcttcggaggaatcacaacttattgggcgagagaaagaaatatctgaaataacacacttaattttaaacaatgatagccagcaggttcaggtgatctctgtgtggggaatgggtggccttggaaaaaccaccctagtaagcggtgtttatcaaagcccaaggctgagtgataagtttgacaagtatgtttttgtcacaatcatgcgtcctttcattcttgtagagctccttaggagtttggctgagcaactacataaaggatcttctaagaaggaagaactgttagaaaatagagtcagcagtaagaaatcactagcatcgatggaggataccgagttgactgggcagttgaaaaggcttttagaaaagaaaagttgcttgattgttctagatgatttctcagatacctcagaatgggaccagataaaaccaacgttattccccctgttggaaaagacaagccgaataattgtgactacaagaaaagagaatattgccaaccattgctcagggaaaaatggaaatgtgcacaaccttaaagttcttaaacataatgatgcattgtgcctcttgagtgagaaggtatttgaggaggctacatatttggatgatcagaacaatccagagttggttaaagaagcaaaacaaatcctaaagaagtgcgatggactgccccttgcaatagttgtcataggtggattcttggcaaaccgaccaaagaccccagaagagtggagaaaattgaacgagaatatcaatgctgagttggaaatgaatccagagcttggaatgataagaaccgtccttgaaaaaagctatgatggtttaccataccatctcaagtcatgttttttatatctgtccattttccctgaagaccagatcattagtcgaaggcgtttggtgcatcgttgggcagcagaaggttactcaactgcagcacatgggaaatctgccattgaaatagctaacggctacttcatggaactcaagaatagaagcatgattttaccattccagcaatcaggtagcagcaggaaatcaattgactcttgcaaagtccatgatctcatgcgtgacatcgccatctcaaagtcaacggaggaaaaccttgtttttagggtggaggaaggctgcagcgcgtacatacatggtgcaattcgtcatcttgctataagtagcaactggaagggagataagagtgaattcgagggcatagtggacctgtcccgaatacgatcgttatctctgtttggggattggaagccattttttgtttatggcaagatgaggtttatacgagtgcttgactttgaagggactagaggtctagaatatcatcaccttgatcagatttggaagcttaatcacctaaaattcctttctctacgaggatgctatcgtattgatctactgccagatttactgggcaacctgaggcaactccagatgctagacatcagaggtacatatgtaaaggctttgccaaaaaccatcatcaagcttcagaagctacagtacattcatgctgggcgcaaaacagactatgtatgggaggaaaagcatagtttaatgcagaggtgtcgtaaggtgggatgtatatgtgcaacatgttgcctccctcttctttgcgaaatgtatggccctctccataaggccctagcccggcgtgatgcgtggactttcgcttgctgcgtgaaattcccatctatcatgacgggagtacatgaagaggaaggcgctatggtgccaagtgggattagaaaactgaaagacttgcacacactaaggaacataaatgtcggaaggggaaatgccatcctacgagatatcggaatgctcacaggattacacaagttaggagtggctggcatcaacaagaagaatggacgagcgtttcgcttggccatttccaacctcaacaagctggaatcactgtctgtgagttcagcagggatgccgggcttgtgtggttgcttggatgatatatcctcgcctccggaaaacctacagagcctcaagctgtacggcagtttgaaaacgttgccggaatggatcaaggagctccagcatctcgtgaagttaaaactagtgagtactaggctattggagcacgacgttgctatggaattccttggggaactaccgaaggtggaaattctagttatttcaccgtttaagagtgaagaaattcatttcaagcctccgcagactgggactgcttttgtaagcctcagggtgctcaagcttgcaggattatggggcatcaaatcagtgaagtttgaggaaggaacaatgcccaaacttgagaggctgcaggtccaagggcgaatagaaaatgaaattggcttttctgggttagagtttctccaaaacatcaacgaagtccagctcagtgtttggtttcccacggatcatgataggataagagccgcgcgcgccgcgggcgctgattatgagactgcctgggaggaagaggtacaggaagcaaggcgcaagggaggtgaactgaagaggaaaatccgagaacagcttgctcggaatccaaaccaacccatcattacctgagctcctttggagttactttgccgtgctccatactatcctacaagtgagatcctctgcagtactgcatgctcactgacatgtggacccgaggggctgtggggcccacatgtcagtgagcagtactgtgcagtactgcagaggacctgcatccactatcctatattataatggattgtactatcgatccaactattcagattaactctatactagtgaacttattttt

SEQ ID NO: 406 - DNA, 11516 bp, Oryza sativa
  source 1..11516: mol_type = genomic DNA
aagcttgaaagtgtgtgaagaaatgaagaaagtgaagtctacttataggacaggtataacggttatgagaagtggaaatgtccgaactgccccgcaaccgccatcagggagtgatctggagcgtccacgccaaaccccaggatcaacggtgatcaccagggttcggctgaacctgggctgggccagatggcttccaaacctagtctgggtctcctcctcgacctgccttatccaattcttgcaattttgggatgtttctttagtagtttaaaagcccattcttgcattgatagatttctccttcacttttagtctggatttcctcccaacttctgggtttatcacctgcataaaaatatacatcaacaattgtggaatatgtgagttttaacacctatcactatgttggatattttattatctggactttatgcagacgttgacggtatagatttggcatttaacagtcgccaacattatacaatcgggtaaatagtattgatgtattccatgaatctgtgtatagaaggtatgccatatccttgacactgacaccatatgtgtttccgtttttgagaaaacatttccatttccaaaaatttctgaccaacactctctatttccgaaaactcatctgaaatccgaaaacttttcaaaccgttttcatcccagtaatgaatggcaggctctacgtgcagacccacaaatgctccacaaagatctcaaaaaatttatcgtataaatttcatacgtagactaaatttcacaaaaattcacttgtgtacccattgaggtatgtattttgttttcaaaaaaaaacacagtttaccttgtggtgctcgggacatcggccggagctcatgatcataatggagtcagtcagggtggctactggagcttatggcggaggaggtcagggtggtgggacgtggggcagagtttagtccggtcggcaaccagagctccgagaggagatctgggcagtagtgagagaagggtcaggaggcgccagagtggccacgacggaggctgggaaagcgatgccgaacagcaaagcatgcgttgaagtaggcggggtggcagcagcctcggggcggagcgggcatggaacaagggtagagctggagtcggtggccggctactgagaccattcacagtgcgtcaccaagttttgatattcttcacatgccacgtagatcagagcggtattagccacatgttacatagtgcaaaactctacaagaccacatatgggttgcttgtagtgggtcccactaataccacttttacacttctctttttacttttcccctctcctctctcccctctcttcctttccccaccggccaccgcagagagccgggcggagacggaggttgcgggggtcgggcggagcggcggctcaagcggaggtcgtggaggcgagcaggagacggcgccgggccgagtggcgacggcggtggggcctagcaccgtgcctcccctcctcctcctcctctagtggtggcgaatcgaggaagccgccgccgccgcgccccacctcttcatctgatgcgggcgggaagctgccgccaccgccgtcgggcagatccagatctccggcctccgtgtcgggcggctacgcggcggcgggcgtcggcgtcggtcagcgccctcctcacctggccagcccaccgactagccctaccgtcgtcatcatccctggtcagcaccctcctcccctggcattcggctgcctcacccctctcctctctctcctctagcggtggtgtgggtcccacctgtgggtccctctgagacgaagaacgcgtagtcaactttggctacgcgcggagctgaggaacgcacacgattggataaagtggcaaaggaatatttgcttttttggttgaggctaaatgctacgtagatctactgtgaatggcctgatggcgcagcggctctcttgcgggacagagtgggacgtgcacgacgagaaatttcctcttgcatgaataacccacggatgtaggcctccttaactaggagctacgaggtgggatttgggaggctttttctatttcaaggcttaaagcctatccaatatgatctctaatcttaaaatttagtgtttatttttgaaaaaaagttggctccaataattttcctaattagcttccaaaaattggaatcttactccctatccttctcgctctccactagtggagaagcgtgctagttcttaacacacgcatgggtggagggatcacatggatattatggaaatatcctcatggactggtgattaacatagtcctactaggagagaattgagtttattctatatcgttatcgacgtttggtatcacgactacgttatttggatggtatggggatcatcggtactagagtatatgcgagattgaggtaaaagagatggagacagatatttttatactggttcgccccttatctaacaggtaatagccctacatcctgttggctaaagccggtattgctcttattcatctgaatcgcacaagtataatatttaggataacctgtctagctgtcatcgacttggcggcatggataaccaactcgtagtcgatgacggggtagtatttctcttcgaatatgaactcgtcgagatcagagatggctctagatctctcttgccggtctcaggaggcaccagatggggtatgcctaggctaatctctaatgtcgatatttagcggcgtattggcttgtgtgtatgttatgtgttgtggctcgtcatctctcctcctagggggcttgtatttatacccatagatgcccccttgtctaagtagaactagggagataaatatggatacgatccgagtagtccttgtcgtttccatatagaactctttttgtcctttcttatccgaaactccttttatatacgaggtatgattccatataagacatggtatatggtgggccctgccgagcttagtcaggaatgtggtatccacaaccctgacaatcatgcagggttcattgtctccgagttctacgcggagactaagacaactcaaggtataaaaggcgcactctctaaggggttcaaaagagcaaatcatagcacgaacacacccaccatagtttacgaagccagaggctgtgaagcctactcgccaggagatcttgtcgactcatctcgacaaggatctcgccggtaacgctggattcatctcttctctttgtactccgtggtttccatatcaatctcatataaactggattatggttattatcttacgaggggtctaaaccagtataatctttgtctctctgattgttttaatatcgtatcatgtagatcctcataccaacttaccctaatacactatttatccgatctacaggtatcccctatcgacaataggtatataagatattataaaaaagatggagacatatgtgagctgatgatttaggctgcattcgttgcagcttctttccaacccatctccctcgttttccgtgcgcatgcttttcaaactgctaaacggtgcgttttttacaaaaagtttatatacgaaagttgcttaaaaaaatcatattgatccattttttaaaaagatagcaaaaaattaagtaatcacacgctaatggactactctgttttccgtgccggaggatagctttcccaacccagggaaacgaacccaaccttaggtgtgttcattgctaggtgttcccaacccctctcccttatattccgtgcgcatgcttttcaaactgttaaacggtgtgtctctttttaaaaaatttctatacgaaagttgctaaaaaaatcatatcaatacatttttgaaaaaaaaagctaatacttaattaatcacgtacgtactaatagaccgcttcgttttctatgcgcagaagatttgttcccaacccccacaacaaacacagccttaacatgcttgcatttaaaaagctataaaatttaataaattataaaattatagataatataacatgcttacttgatgtgacactttacctgttaagttttaggagtcggtgtttagattcaaactttttttttcaaacttccaacttttccatcagatcaaatgtttgggcacatgcattcagcaataaatgtggacaaaaaaaaaccagttgtacagtttgcatgtaaatcacgagatgaatcttttgagcctaattacgtcatgatttgacaatgtggtgctaaagtaaatatttactaatgacagattaattaggtttaatagatttgtctcgcagtttacaggcgaaatatataattttttttgttattagtttatatttaatacttaaaatgtatgtccatatacttaaaaaaattttgtaccacgaactaaacacagccaagtggactctaactctctctctctctatatatatatatatatatatatagtaatgtgttcgtatgtcctggatagaaactcatttcctccgcatagaaaacggagcggtctattaatacgtgattaattaagtattagctatttttttcgaaaataaattaatttaattttttaaataacatttatatagaaactttttaaaaaacacgttgattaaccatttgaaaagcgtgcgtgcacgcggcgtgaaaaatgaggcagagatgttgtgaaaaggagtgccgaacacagtcaaagcctcaggtggtgtttggatccagggacttaacttaaactttagtccctatatttagacactaatttatagtattaaatatagactacttataaaactaattacataaatgaaagctaattcacgagacaatttttttaagcctaattaatccataattaaagaatgtttactgtagcatcacataggctaatcatggattaattagacttaatagattcatctcgtgaattagtccaagattatagatgggctttattaatagtctacgtttaatatttataattaattttcaatccaatatgataggacttaaaatttagtcccatctacagggtcagaggattcggtcggtctcagggcagtcctctccgtataacgcagcgcccgatattttttatgggcataaatagtctgattgctactgtagcattttgttcaactaactccccaatgggcaatggctagtcgtcgagtgtcagtagtcaagagtagactccgcttcgcttcgccgtaccttctctcttctcgttctcctatttcacaaatcacaaccggattgctttcttccttcctccggtctggtccccaacctccgcggcagccatggttggcgccgagatgcttgtggccgcggcggtgagccaggtcgcccggaagatcaacgacatcgtgggggtcgcgcagggcgaggtgaagctgtgctgcaatttcagcgacgatttggagggcatcaaggatacccttgtgtacctggaaaccttgctgaaaaatgcggagaataactccttcggaagcgacagggccaacctgcgccactggcttggccagatcaagtccctggcttacgatatcgaagatatcgttgatgggtactactcttccaaggagcagttcgatgggggcagctatgcacagaaggtaacagaatctcattcctttttcttcatcggtaaaatttcttcaatttcaactcaattttagaatgccccgcaaaaaaaaaatcaattttagaatggatctacattaatgagatgtagaggtgtattactatgggcaggggaagcaccgtgtgtgcatccttagttactgcataggcaataagttatcctttccattgtccaaaaaaattttgaagcaaggaggaaaagcttgaagcttagtcttttagttttttctttttgattattttgttatttatctcagttatgagattaggagtgtatatgcactcgtgtagcttttgtctgtgtgtggatatagaggctggatttctatccattatcttaaataaattgtccaagaaatttatcaggggaaatgcagttagatgcaccattagaattgcttcattgcctgtggaagagtggaacagctctgagaattgtgattatgttttatatatttaaacaatattgattactagtactagatttactctctttttttttccttatgaaattccttgatactggtagtagtgagagataaacctaataattacatgccacatacctgtagattgtactatacttcaacacccttttgcaaatagtgagagataaacctaatacttacttacatgccacatcgtcagagcactcaattcttttttgttttggtaagcaatcagcttttgcctttacatagacaaaaattgatcgacgaatattttgaaaaaaaaaacctttgtatttatatggaaaagaaaatgcaaggtactttaccaaacaattgtgcatctatgatctatctgctatgtaggggttgataccggccttggttccttgctgcaccaactgttatttacctatctccatttttgttcttccagcaacaatagtatcaaaatactaaatgtctttcctgactaaggctaccttcataaatttacaggggtcattattctgctcgctatccaatccaatgcttctgaaaggtagcatggtttataagatgaaatccaagagagagatgctacagcaaagccaacagttgcccaatcagtatcatttcctttcatatatcaattcagctgtgcattattttgaggagaagcaaacaacatcatacagaaatactgacattgcaattgtcgggagggatgctgatttggatcatctcatggatcttttaatgcaaaacagcgctgaagagctttgtattatacccatagttgggcctgtaggttttggaaagacaagccttgcacagttagttttcaatgatacaagaacagaggtattcagctttaggatatgggttcatgtttccatgggtaatatcaaccttgaaaaaattgggagagatatagtttcacaaactacagaaaaaattgagggaaatatgcagctgcagtcaatcaagaatgctgttcagcgtgtgctaaataaatatagttgcttgatcataatagacagcctttggggaaaggatgaagaagtgaatgaattgaagcagatgttgcttacaggtagacacacagaaagcaagatcatagtgaccactcatagcaataaagtagctaagctgatttccaccgttccactgtacaagttggcagctttatctgaggatgattgtttaaaaatattctctcaaagggcaatgacaggtccgggtgacccgttgttcagggaatatggagaagaaatcgttagaaggtgtgaaggcacacccttggtagccaattttctcggttctgtggtgaatgctcaacgacaaaggcgtgagatttggcaagctgcaaaggatgaagaaatgtggaagatagaggaagattatccccaagacaaaatttcaccactatttccatcattcaagataatatattataatatgccccatgagctaagattatgctttgtatattgttcaatcttccctaaaggaactgttatagaaaagaagaaacttattcagcaatggattgcacttgacatgattgagtccaaacatggaaccttgccacttgatgtaactgcggagaaatatattgatgaacttaaagcaatctatttccttcaagttttagagcggtctcaggtaagttcatgggttgctttttaccttctgtacatatcctatgtaactagaatgtggttaaatatctccattaagcatagtagcttataccattgttttatttctaaattctcaataagtttctgtaagaagattgaccatgatagaatggccaatagtgatatctcaacaaacaagtaacactgttttcctccacagaatgatgcagaaagatccagtgcttctgaggaaatgcttcgcatgcataacttggctcatgatcttgctagatcggttgctggtgaagatatccttgttattttagatgccgagaatgagcgcaatgccagatattgcaattaccgttatgcacaggtgtctgcttctagtttagagtcaatcgatcgcaaggcatggccttccaaggcaaggtcactaattttcaagaatagtggtgtggactttgagcatgtcagtgaagttctttcagtgaacaaatacctgcgtgttttggatctcagtggatgttgtgttcaagatattccatctcctatctttcagctgaaacaattgagatacctcgacgtttcatctttatctattacagcactccctctgcaaattagtagctttcataagttacaaatgttggatctttcagaaactgaactaacagagttgccaccctttataagcaacttaaaaggactgaattatttgaatctccaaggttgccagaaacttcaacgattgaatagccttcatttgttgcatgatctacattacctaaacttgtcatgctgccctgaagttactagttttcctgaatctattgaaaatctgaccaaactccgtttcttgaatctttctggatgctctaagctttcaacattacctatcagatttttggaatcatttgctagcctctgttctttggtagatcttaacttaagtggctttgaattccaaatgttgcccgacttttttggcaacatatattcacttcagtatttaaatctgtcaaaatgtttgaaacttgaggtattaccacaatcttttggccaacttgcatatctgaaaagcctaaatctttcatattgttctgatcttaaactgctggaatcctttgaatgccttacctctcttcggtttttgaatctctcgaactgctctaggcttgaatatttgccatcatgctttgacaagcttaataatttagagtctctgaatttatcacaatgtcttggacttaaagcactacctgaatcacttcaaaaccttaaaaatcttcagcttgatgtttctgggtgtcaggattgtatagtacaatccttttctctaagtaccagaagttcccagtcctgccaacggtcggagaaagctgagcaggtcagatcaagaaacagtgaaatttcagagatcacttatgaggaacctgctgagattgaacttttaaagaataatccaagtaaagatttggcctccatctcacacctaaatgaggatagaattgaggagcctgaagttgtcactgaggtaaacttacattttattaaagaaataaaaacaatttgcctagtgtttcctttgaaatttccttatgtcaatacttaatttatctttgatagatttgagttactggtgattgagaaagttgtatgccaatttgaaccagtttctcactaccaactgaaaatgatgacgaacggaaactttattgtagttgtgctcgaattgaagatcccttttctaatgaggtgatctaattgggtaccagaacatgaatcatacttttttcagtagttcttaacatttcgtagagaaaatacatgagtgttccttcaattaaaaaactccctagaggccagcaagttataaatttaaatgggattctccttattacctagatttatgttttcagaaaattttgtaatatcatactaactaattgtccatgtccttgtttcttgatgtagccaagtgcaactagaggtatggtacaacagattccaggaaaccagctctcatcgccttcatctcatctttcttcctttgcatcaagctcagcgccatttgcatcctcctcttcggacacctcaacaagtgagcatccagtgcctaatgaagaggcggcaggtatggtacttcaaataattttctcccgatttaatcatctcaagatgaggttcacttctttatttgaatataccattataaggaaatagatcatgcgccctcttgtttaaaggaatttgatgtttttttatattcgctctctttgagatatacctgtcatccagcagtggtaaaaaggatagtatatagctgacaaatatgttcatataatttccttgtgggtaattttgatattctctttctatcttaatacgtgttatgagcaccggctaatgaccgaatggggtatgaatggaacaccggaggtcgaggcttttggcagcctcttcgacgtctggcccatgatcggcgacgaaagcaaaagcaggggatgagagagtagagaattggagacgagactatagattgaatcttgcttggttcattcatgatttcgtggcccttaattaggcttacgattgaactgaattagctaataaaaaaggataacaaagtcttctctaaatgtaagcaatcggatcactatcgctcgtccggcatgccgcgtcagttttcagctcgcgtgatctccttcgacgccgcttggaccggttgctgcatccgcgtagttgcgtttcttcatgtagacgattccgaccctttacattacaactacttggaattctttgagtgttctaaaataatttggatagtggtacatatgtggttacattttcttaatggtgacatatagccaagttggactaagattaattttaatttgtgtggaatgagaaagagtcaagacagtttgatacgtagaagtttgcatattcagaaccttatactggtttgtcttggtttattttcttgacaatgcagctttgacagttcctcggtccaaagagaaatgcgacaacactcccatgccggtaaaagatggcctgatatctgaagatgatgcaccggtacatctgcatcagaagcccctgcaggcgacagccatggcagccatatgactgacctgtaatcctacaagaaaccaactgaagattcatatgtggactgagtgaaattatgaaagttattggaataaattgttgctctgtatgtgagagcaagcttcagtccgttagcctggttccttttagtagtgttctactattgggagatcttcatcaacattttacatgaaacgtgatgtaatgaacctctgttaattgttaattgtcagagctctagttttttgtggtataaattttgttgcaagggggcaatgcactcaacttttgaatcatttgattggtatggaaatcattgcatttgtgcagagttcaggcagagttcagttcttgcatttgcacatcgtattactattacctggccttgtttggcacatctccagttccagctccacctctcctagagctggagctcagccaaacagtttcagctccaccgaaaatgggagcggagctgggtggagcactctaacaaaatgaactagagaggtggagctaggttaagctgttccacaactccacttcagatctaactcctaaagttaaatttaaaagttgaagctctaccaaacgagaaaacggacgatatgccactgtataggttgggttcgaatgaaatgccactcaatacaatgtatcggataaaatgccactcaatacgttgcctattggatgaaatgccac

SEQ ID NO: 407 - protein, 1388 aa, Malus X robusta
MGGEAFLVAFLQVLVDKLAHREVFKYFGLVKGVDQKLKKWSATLSAIGAVLNDAEERQLTAKNNTLKLWLEDLRDLAFDVEDVLDKYATKMLKRQIQHAHSRTTSKLWNSIPDGVFNFNMNSEIQKISERLQEISEQKDQLNLKIDTGALTTRARRNISPSSSQPDGPVIGRDEDKRKIVELLSKQEHRTVNFDVVAIVGMAGVGKTTLAGQVLNDMVATQTFQPAVWACVSDDFNLERVTKQILESITSRQCTTEDYNKVQDYLHKELAGKKFLIVLDDVWKTCSYGEWMKLQSPFRDGAQGSKIIVTTRDTDVSKMMGAATLVHNLEPMESSVCLQVFEQHAFLNSNDDKPPNYELLKEKIAAKCRGLPLAARTLGGVLLRKDTYEWEDILNNKLWSLSNEHDILPVLRLTYFYLPSHLKRCFAYCSILPNDYEFEEKQMILLWMAEGFILPRPEDKKQIEDLGADYFRDLVSRSLFQKSTKCISKYVMHDLIGDLARWAAGEICFRLEDKQNDDGEQLRCFPKARHSSYIRGLSDGVKRFEVFSELKYLRTFLPLRKDSFWNYLSRQVAFDLLPKLQYLRVLSFNCYKITELPDSIGDLRYLRYLDLSYTDITSLPKSTSTLYNLQTLILEGCSKLKALPIDMSNLVNLRHLNNSNVSLLEDMPPQLGRLVNLQSLTKFVVSGGGGGDRSGIRELEFLMHLRGTLCISRLENVTDVEDAQRANLNCKERLDSLVLEWSHSSDTRETESAVLDMLQPHTKLKELTIKSYAGKEFSSWVGVPLFSNMVLVRLEECNNCLSLPPLGKLPHLKELYIRGMNAVESVGAEFYGECSLPFPLLETLEFVDMQHWKVWLPFQTDHRGSVFPCLKTLLVRKCSKLEGKLPENLDSLASLEIVKCEELLVSIANYKQLRQLNIDGCKGVVHTAAKVEFELLESLYLSNISELTSLQTGELCRNGLNMVRDLKINGCEELTSSLKNEAILLQQLISLGRLEIEDNSLLVEELGKEADELLQLQILGCKLEFLKLKKCKNLLKLPEGLNQLSSLQELRIHECSSLVSFPDVGLPPSLKDIEITECHSLIYFAKSQIPQNLRRIQIRDCRSLRSLVDNEAVGSCSSSSHNCLEYLNIERCQSLTLLSLSDQLVRALRELDIYDCEQLEFLAPDGLFCNNTNYFLENFRIRRCQNLKSLPRLSGGIRGSNLREIRITDCDRLEALPEDMHNFNSLEKLIIDYREGLTCSFPANLTSLMIWKVKSCKSLWELEWGLHRLTSLRYLWIGGEDPDMVSFPPDMVRMETLLPKSLTELSIGGFPNLKKLSSKGFQFLTSLESLELWDCPKLASIPKEGLPLSLTELCIYGCPVLKERCQPGKGRYWHKISHIPYIDIDWKMI

SEQ ID NO: 408 - protein, 16 aa, synthetic construct
MWVLCLFCWPTYTHGS

SEQ ID NO: 409 - protein, 6 aa, synthetic construct
MHMYLK

SEQ ID NO: 410 - protein, 10 aa, synthetic construct
MSYKLHVVPW

SEQ ID NO: 411 - protein, 7 aa, synthetic construct
MSATPQV

SEQ ID NO: 412 - protein, 8 aa, synthetic construct
MRKHNWHI

SEQ ID NO: 413 - protein, 29 aa, synthetic construct
MRKHLQHTYILSFSLSLSLIPAQLCGRRE

SEQ ID NO: 414 - DNA, 66 bp, Dichanthelium oligosanthes
  source 1..66: mol_type = genomic DNA
aatttaactccgcctatgttgtctcaacatagccggtcccaagcccggataaaggaggagggggtt

SEQ ID NO: 415 - DNA, 61 bp, Solanum lycopersicum
  source 1..61: mol_type = genomic DNA
cttgtaactccgcctgtcaagtcacagccggtcccaagcccggaaaaaggaggagggcaag

SEQ ID NO: 416 - DNA, 52 bp, Sorghum bicolor
  source 1..52: mol_type = genomic DNA
tgcttaacactgccaatgccggtcccaagcccggataaaagtggagggggca

SEQ ID NO: 417 - DNA, 52 bp, Sorghum bicolor
  source 1..52: mol_type = genomic DNA
tgcctaacactgccaatgccggtcccaagcccggatagaagtggagggggca

SEQ ID NO: 418 - DNA, 52 bp, Sorghum bicolor
  source 1..52: mol_type = genomic DNA
tgcctaacactgccaatgccggtcccaagcccggataaaagtggagggggca

SEQ ID NO: 419 - DNA, 80 bp, Oryza sativa
  source 1..80: mol_type = genomic DNA
tatgtaactccgcctatgtcatcttaagtttatctaaatgatatagccggtcccaagcccggaaaaaggaggagggtata

SEQ ID NO: 420 - DNA, 43 bp, synthetic construct
  source 1..43: mol_type = other DNA
nnnnnnctgatgagtccgtgaggacgaaacgagtaagctcgtc

SEQ ID NO: 421 - DNA, 59 bp, synthetic construct
  source 1..59: mol_type = other DNA
acttgtccacaatcttttctgatgagtcgctgaaatgcgacgaaactcgatatgttcaa

SEQ ID NO: 422 - DNA, 171 bp, Bacillus subtilis
  source 1..171: mol_type = genomic DNA
cctataattatagcgcccgaactaagcgcccgaaaaaaggcttagttgacgaggatggaggttatcgaattttcggcggatgcctcccggctgattatgcagatcacagccgtaaggatttcttcaaaccaagggggtaactccttgaacaaagagaaatcacatgatctt

SEQ ID NO: 423 - DNA, 68 bp, Hepatitis delta virus
  source 1..68: mol_type = other DNA
ggccggcatggtcccagcctcctcgctggcgccggctgggcaacatgcttcggcatggcgaatgggac

SEQ ID NO: 424 - DNA, 186 bp, Otolemur garnettii
  source 1..186: mol_type = genomic DNA
ggcgctgtgtcgcaatctgcgaagggcgtcgtcggcccaagcggtagtaagcagggaactcacctccaatgaaacacattgtcgtagcagttgactactgttatgtgattggtagaggctaagtgacggtattggcgtaagccaataccgcagcacagcacaagcccgcttgcgagattacagcgc

SEQ ID NO: 425 - DNA, 52 bp, Chicory yellow mottle virus
  source 1..52: mol_type = other DNA
caacagcgaagcgcgccagggaaacacaccatgtgtggtatattatctggca

SEQ ID NO: 426 - DNA, 52 bp, Arabis mosaic virus
  source 1..52: mol_type = other DNA
caacagcgaagcggaacggcgaaacacaccttgtgtggtatattacccgttg

SEQ ID NO: 427 - DNA, 50 bp, Tobacco ringspot virus
  source 1..50: mol_type = other DNA
aaacagagaagtcaaccagagaaacacacgttgtggtatattacctggta

SEQ ID NO: 428 - DNA, 52 bp, Chicory yellow mottle virus; identical to SEQ ID NO: 425
  source 1..52: mol_type = other DNA

SEQ ID NO: 429 - DNA, 52 bp, Chicory yellow mottle virus; identical to SEQ ID NO: 425
  source 1..52: mol_type = other DNA

SEQ ID NO: 430 - DNA, 50 bp, Tobacco ringspot virus; identical to SEQ ID NO: 427
  source 1..50: mol_type = other DNA

SEQ ID NO: 431 - DNA, 68 bp, synthetic construct
  source 1..68: mol_type = other DNA
ggagagagaagtcaaccagagaaacacaccaacccattgcactccgggttggtggtatattacctggt

SEQ ID NO: 432 - DNA, 526 bp, Oryza sativa
  source 1..526: mol_type = genomic DNA
ctacggacttgattgtattgagccttggtatggaaacctgctaagtggcaacttccaaattcagagaaaccctggaattaaaaaaggggcaatcctgagccaaatccatgttttgagaaaacaagcggttctcgaactagaacccaaaggaaaaggataggtgcagagactcaatggaagctgttctaacgaatcgagttaattacgttgtgttgctagcggaactcccttctaaattagggaaagaagggctttcgaaatctaatacacacgtatagatactggcatagcaaacgattaatcacagaactcatatcataatataggttctttaattcttttttaaaatgaaaataggaatgattatgaaatagaaaattcataatttttttagaattgttgtgaatccattccaatcgaatattgagtaatcaaatccttcaattcatagttttcgaaatctttttaaaagcggattaatcggacgaggataaagagagagtcccattctacatgtcaatactga

SEQ ID NO: 433 - DNA, 526 bp, Oryza glaberrima; identical to SEQ ID NO: 432
  source 1..526: mol_type = genomic DNA

SEQ ID NO: 434 - DNA, 74 bp, Nicotiana sylvestris
  source 1..74: mol_type = genomic DNA
gaaagtcgtattcgatgaaagtcgtatgtacggcttggagggagatctttcatatatttcgagatccagcctac

SEQ ID NO: 435 - DNA, 130 bp, Solanum lycopersicum
  source 1..130: mol_type = genomic DNA
gagagccgtgtgatgggtgactatccagcacggttaagagagcacttttagtctgctctggtgaatggaagccccctatcatgcaataaggaagcagctcttctcacagcggagtcaccgttgactttat

SEQ ID NO: 436 - DNA, 77 bp, Hordeum vulgare
  source 1..77: mol_type = genomic DNA
gaaagccgtatgctttggaagaagcttgtacagtttgggaaggggttttttgagagaaaagaagaatctacttcaac

SEQ ID NO: 437 - DNA, 79 bp, Hordeum vulgare
  source 1..79: mol_type = genomic DNA
aggagctggatgagaagaaactctcatgtccagttttcgagtagagatggaactaagaaagagaaccatcgactataac

SEQ ID NO: 438 - DNA, 79 bp, Capsicum annuum
  source 1..79: mol_type = genomic DNA
aggagccgtgtgagatgaaagtctcatgcacggttttgaatgagagaaagaagtgaggaatcctcttttcgactctgac

SEQ ID NO: 439 - RNA, 43 nt, synthetic construct
  source 1..43: mol_type = other RNA
ccaatcgtggcgtgtcggcctgcttcggcaggcactggcgccg

SEQ ID NO: 440 - RNA, 49 nt, synthetic construct
  source 1..49: mol_type = other RNA
gagacggtcgggtccagatattcgtatctgtcgagtagagtgtgggctc

SEQ ID NO: 441 - RNA, 132 nt, synthetic construct
  source 1..132: mol_type = other RNA
gtgctcgcttcggcagcacatatactagtcgaccgccagatgccttgtaaccgaaagggggaagaggaaggaggtctgaggaggtcactttcccgaaaggatggcgtctagagcggacttcggtccgctttt

SEQ ID NO: 442 - RNA, 40 nt, synthetic construct
  source 1..40: mol_type = other RNA
ggcacgtacgaagggacggtgcggagaggagagtacgtgc

SEQ ID NO: 443 - RNA, 41 nt, synthetic construct
  source 1..41: mol_type = other RNA
ggcacgtacgaaggagaggagaggaagaggagagtacgtgc

SEQ ID NO: 444 - RNA, 46 nt, synthetic construct
  source 1..46: mol_type = other RNA
ggcacgtacgaaggaaggattggtatgtggtatattcgtacgtgcc

SEQ ID NO: 445 - RNA, 45 nt, synthetic construct
  source 1..45: mol_type = other RNA
ggcacgtacgaaggaaggtttggtatgtggtatattcgtacgtgc

SEQ ID NO: 446 - RNA, 42 nt, synthetic construct
  source 1..42: mol_type = other RNA
ggcacgtaccgagggagtggtgaggatgaggcgagtacgtgc

SEQ ID NO: 447 - RNA, 83 nt, synthetic construct
  source 1..83: mol_type = other RNA
gggaagatacaaggtgagcccaataatatggtttgggttaggataggaagtagagccttaaactctctaagcggtatcttccc

SEQ ID NO: 448 - RNA, 52 nt, synthetic construct
  source 1..52: mol_type = other RNA
ggctagctggaggggcgccagttcgctggtggttgggtgcggtcggctagcc

SEQ ID NO: 449 - RNA, 98 nt, synthetic construct
  source 1..98: mol_type = other RNA
gacgcaactgaatgaaatggtgaaggacgggtccaggtgtggctgcttcggcagtgcagcttgttgagtagagtgtgagctccgtaactagtcgcgtc

SEQ ID NO: 450 - RNA, 95 nt, synthetic construct
  source 1..95: mol_type = other RNA
gatgtaactgaatgaaatggtgaaggacgggtccagtaggctgcttcggcagcctacttgttgagtagagtgtgagctccgtaactagttacatc

SEQ ID NO: 451 - RNA, 100 nt, synthetic construct
  source 1..100: mol_type = other RNA
ggagacgcaactgaatgaaatggtgaaggagacggtcgggtccaggtgcacaaatgtggcctgttgagtagcgtgtgggctccgtaactagtcgcgtcac

SEQ ID NO: 452 - RNA, 57 nt, synthetic construct
  source 1..57: mol_type = other RNA
ggatgcgccttgaaaagcctgcttcggcagctggtgaatgacagctatggcgcatcc

SEQ ID NO: 453 - DNA, 44 bp, Pea early-browning virus
  source 1..44: mol_type = other DNA
attcaattaattcaatagaattaattctcgtattaatatgacaa

SEQ ID NO: 454 - DNA, 45 bp, Tobacco rattle virus
  source 1..45: mol_type = other DNA
attttatcactcttataagagtgatactcgtattaatatgaccaa

SEQ ID NO: 455 - DNA, 45 bp, Tobacco rattle virus
  source 1..45: mol_type = other DNA
attcaaagattacaatagtaatctctaccgtatttatttgacaaa

SEQ ID NO: 456 - DNA, 45 bp, Tobacco rattle virus; identical to SEQ ID NO: 455
  source 1..45: mol_type = other DNA

SEQ ID NO: 457 - DNA, 45 bp, Tobacco rattle virus
  source 1..45: mol_type = other DNA
attcggtagtgtgaaaacacattacctacgtattaatatgactaa

SEQ ID NO: 458 - DNA, 38 bp, Pea early-browning virus
  source 1..38: mol_type = other DNA
ttatggtctaagataattcttcagaccctcgtaatttt

SEQ ID NO: 459 - DNA, 38 bp, Pea early-browning virus
  source 1..38: mol_type = other DNA
cttaacaagaatcttatcaagattctgttcgtattcta

SEQ ID NO: 460 - DNA, 38 bp, Pea early-browning virus
  source 1..38: mol_type = other DNA
caaggtatatgcgaaacacgcgtaataccttcgtataa

SEQ ID NO: 461 - DNA, 211 bp, Tobacco mosaic virus
  source 1..211: mol_type = other DNA
gaaaaaagagtgatgtccgcaaagggaaaaatagtagtaatgatcggtcagtgccgaacaagaactatagaaatgttaaggattttggaggaatgagttttaaaaagaataatttaatcgatgatgattcggaggctactgtcgccgaatcggattcgttttaaatatgtcttacagtatcactactccatctcagttcgtgttcttgtca

SEQ ID NO: 462 - DNA, 135 bp, Tobacco mosaic virus
  source 1..135: mol_type = other DNA
ctttgtgatgttgctgtttcgttgaacaattgtgcgtattacacacagttggacgacgctgtatgggaggttcataagaccgcccctccaggttcgtttgtttataaaagtctggtgaagtatttgtctgataaa

SEQ ID NO: 463 - DNA, 43 bp, Cucumber mosaic virus
  source 1..43: mol_type = other DNA
ttctcatggatgcttctccgcgagattgcgttattgtctactg

SEQ ID NO: 464 - protein, 10 aa, synthetic construct
  VARIANT 2: note = X is R, G, or F
  VARIANT 3: note = X is Y or G
  VARIANT 4: note = X is A or F
  VARIANT 5: note = X is Y or V
  VARIANT 8: note = X is any amino acid
KXXXXILXFY

SEQ ID NO: 465 - protein, 9 aa, synthetic construct
  VARIANT 3: note = X is L or F
  VARIANT 4: note = X is Y or I
  VARIANT 7: note = X is any amino acid
IVXXVLXNL

SEQ ID NO: 466 - DNA, 82 bp, Nicotiana tabacum
  source 1..82: mol_type = genomic DNA
agacgcatccatggctgaatggttaaagcgcccaactcataattggcgaattcgtaggttcaattcctactggatgcaaaga

SEQ ID NO: 467 - DNA, 87 bp, Lolium latent virus
  source 1..87: mol_type = other DNA
gaaaaccaaaccaaaccacaccagccaaaacggaccaacccagccacatctacggacttcgaacgcaaaagctagtagatatcccag

SEQ ID NO: 468 - DNA, 194 bp, Cassava Colombian symptomless virus
  source 1..194: mol_type = other DNA
gtcattggaaccatctctgtacaacattaactataattttaatggttttcagtacttaccgggctcacatggtgggggttcataccaccatgaattcaaagacttggaatggctcaaagtaggttacattaccgagaaacacaaagaaggcgatgtttggcagcctcgtgaaaataatcagaaatacactacta

SEQ ID NO: 469 - DNA, 60 bp, Apricot latent virus
  source 1..60: mol_type = other DNA
ggatacgcaaacaaactctgaacaagtaaattataaaggcaacttcataatttgcttgtg

SEQ ID NO: 470 - DNA, 97 bp, Lolium latent virus
  source 1..97: mol_type = other DNA
ttgtggcaccactggatgtatccagtacgcctgttttagcgacctaaatgctaataaggaccgaggggaggtacaccctcggttttgccgtcaaagc

SEQ ID NO: 471 - DNA, 343 bp, Cassava Colombian symptomless virus
  source 1..343: mol_type = other DNA
cgctaactccctcggactgttggataaccgaggataaataatccatgtttagtcctcctagctagggactcttagtcatatagctagcatctgttggtaccgagataaccaacattaaataactcggttttcaggcatgcttcagcgtttgtggtgcctgtcatactaacgctatatattaactaggattagttatatattaatcgccataatggctaggtgaaggaaaacacctccaacgagaagttggtttaaaccgcacgtcgaagctatacgtaaaacttaaacagcgtgcttcataggtccaggaggagacctataaaaaaaaaaaaaaaaaaaaaaa

SEQ ID NO: 472 - DNA, 139 bp, Apricot latent virus
  source 1..139: mol_type = other DNA
aaataaggtcgtgcgtcttgctttcagtttctccagtatttatgcttttaaataaagttgatcccaacctaatcgggacggcagagtgtgttttatttcaatttcctactttgcttatttttgttttaactagattttc

SEQ ID NO: 473 - protein, 1729 aa, Lolium latent virus
MTTLALNLAQYNDPITKGIIAQESLRRVRPDLKAVVNVNPYAIPTSAALVLEKLGIGTHPMSLAVHPHAPCKAIENQILNTVGHLLPKEQPVTFMAMKKSKLNMLRRHPSRADTFINPIYHPRDNVRYGLDPDPDQDASITASFLEVKTSTAFMQDTLHYLTPEDLLDIFETSPKLENLIASFVLPVEATRNMKSLYPDLYSIHYTHGGFQWAPSGHLGDAYFHEPWQLYWLRCGSLTRLIEEETTTTVQPPPGFEGEAYTRVRKEVRELKIYAERVTSIGAHHLFIFSRNAKATPRVRSYSQNGKWVTLPRIFRPVSHNVQTPLKQEVANSLMLYTYAVRPSLKDVAAKVRQKFDEKDLAEHSPLEITHLINYIYYIDQRAYLTNDDDILSDNLLKRWIFTPIQAAYKKAKGFLLGPDDFQKLLKALEWQPVTFDYAVDHYKSNPWRIHASRTGAKMRQLKNFLSRTTGLCEAVEDDALEGSELLKELEGNMWFRNPSEVEKEVFDAIVADLPPDSQRSELILEDPNSNARDYLPIQQDQPSVTQGPDEAAQTQTPTATSMVTNSVAARMPPPVPRTLREHHEQFPTTVRASFEQPSSTRAPETSENNTPAESVTPSPRAIYVGDFAIMDANASTSRASSPSPRRTVVSPRQPEAQNETLGRQIVSRVSPAHGCQMSPYAAQLAHQLSEQTAYTDVIGQRMVAFYSQHSRSYKYGRHEHRSQSWLPVIDSLQVALGLDESYDHCLIQRYRKHARVGLHADDEECYEPDSTIVTLNLYGNADFLIERNTDKASETITLQHNDMLFMPSGMQVTHRHAVCSLYEGRVSITFRNKTKDYLRKSAPDMNPVEQPGASAGQLTGPLDHRPEELPWEHWIPRLNRLGFTGLQKQTDPEGKLIYPITEIRQDMVYVPFPNCCPGPLRKDLEAMGRRPVRYTVDTGRALTLASDIKNNRVGALLQNADLTWKTLLVEYCRMEPTSVPMTVIHGAGGSGKSKLLQDHLNRAELNVVIIVPTRVLQQDWRNKMTEFPSFLVQTYEAAMMESAPQMVVFDDYGKLPHGYIDLFCQFHPSVEYVILTGDARQSTYYEYNSDAGIRNLPTNIEVFKQYCGYYINCTHRNKQDLANMLGVYSEKMGSTHFTFGNTCETGSLLLVPSGTQKTVMGEAGHKTETYAGCQGITADKVQIMIDHDTHKSADSHMYTALSRATEHIHFYNSIAGLNTARFHAKLNLTPYLKTFIQVITERAAAETEPAEYTVQAPTARTHIPVENCSTFLEKDLEEQRAKEDREVYTQAGATNVFQTNSPIVQCFQHQQPKDGALSIITHAKRLQYASAEANQAEYRAKLQIGAALWENFKTAMEIPDEPVPFIRDLWEQSEAEVLSTYLSKSEMAIKNGKNRQDPDWQDERMFVYLKAQWVTKASKFNLPTAKAGQTISAFKQAVVMKFGAMARYLRRITPKPDNIRINCEMQPQDISKWALGLDSHNRPTKQKWNFERPAFASDFEAFDQSQDGAMLHFEALWARHFNVPSSLIEEYLFLKMHAQAPKGYLTIMRLTGEGPTFDANTACSIAYNHTRYEIPKSCMQLYAGDDMLLDQVPVEKTGFKNIAAGLKLTAKTEIFEQKRGKWGEFCSWWMTPYGLVKDPITLYHRILLASEIGDLSKKIDAYAIEAEPAYALQGRLFDCFNEEQMTAHYGTIRRLIIEGKTNFSLDDQAPRHQDLQGILNCMDAKFMYH

SEQ ID NO: 474 - protein, 1066 aa, Cassava Colombian symptomless virus
MLESFGANHLLVFQRGKLLTPRVRTFRSDEMVYLPQIFHPAELNQVQPLKKTLAMQLLLYSKSLKTVTLTDIIAKIRQLIQTKELANYDPDEILHMANYFYFTSQAPALNTYDDILSLDIFERLTLPLKSRIVALYEKLTGASAFRQLLQALQWRTMTYSIEVEHFYEGIYPEQWPVDEREYSDSDEEDGESRPNRKEEINDLSPPSPIPASTSNAASSSNNPNPQTGSVKLPWQEHLHILNKHGFRGTELQRYCNGLISPILEVRDLPVHVFNAHERMPPALLNRLKTLGREPVRVPILSSRAAPYASDIKNNRVGAYYRKLSQAWRDKLSLDCENGDITIPMSVIHGAGGSGKSQFLQEWMTTLKRDHKDVVVVLPTTELRADWVRKVPTIDNRVFKTFEKALERSYGTIVIFDDYGKLPAGYIETFLFAHRGFQLAILTGDSCQAVHHEPNHQASSYTTIPAVEHFGAYSRFYLNATHRNRKDLANALNVYSEKEGVTNIRHSSSIFEGTPVLCPTTIKQTALRELGHKSLTYSSCQGLTAPNIQILLDSSTPQSSNRVMYTALSRATDAITFVSTAKCSNDMWDKLSATPYLKTFIERIKEEPAASSSVPEIEELEPQIPTHFPSTNNSFTLEDLVEELPEKHQREMFSPSFGYSNAIQTQDKVVQLFQHQQAKDDTLLWATIDARLTIGTAESNLKEMFMKKDIGDILFLNYQQAMQLPKERIPFNIDLWRACQEEVSSTYLSKPIGQLVNSAMRQSPDFPTNKISLFLKSQWVKKTDKLGCLVVKPGQTIASFMQQTVMTYGVMARYMRRMRQAFQPDNILINCEISPRGLNDFVLEKWDFHRDSHENDFTAFDQSQGGAMLQFELIKAKHHCIPEDIIEGYRQVKLNAHIFLGTLSIMRLTGEGPTFDANTECSIAYHHTRFHVPAGSAQLYAGDDMAQDSTPTEKASFSLLKEKLKLTSKTIRRKQKVGDFASFCGWRITPLGVVKDPLKLLAGLELAERLGKVQDTALAYAFDAHHAYKHGDRLHEIFTEKEADYHQALVRKLHLHHQADALIRGPT

SEQ ID NO: 475 - protein, 2184 aa, Apricot latent virus
MALLTRTAAEEVIASFTSEEQSRISAQAVLTLANVEKDRHDLFNYALPELAKVRLYNSGIYLSPHSYKPHSHPACKTLENNILFNILPSYLDNSFYLVSIKKNKVDFLKRRHPDLQMIETINRYISSLDKIRYGSFFHVSPSKVSLKFKCDRRTGFETDASLVDLIPGCMEGARKNFFFHDELHYWRKEALITFLDHVKPEIMLASIVYPPEILAGAKESLNPWCYTFKIIDKDLVFFPDGEESEAYIQPLSGSYLLKTSRIVTPSGQVFNLDLIKSSFSHHLISITKGEAIGQKMRFFNGFEAVAMKGLNPLRRKVESCLPISKSTILKIYRYLRTLKKPDLQSAMAKLSQVCKDPNGYEIKFFEEFSKLCLKCDTLNTNMLPDMKRIVQGFFLKLFPNPIARNFKVVQQLHLDNFIETLEDFSFCVPTEELTLDWKDDLEFVNLTFGETDFDLDESFDSTWGVKKDHVNITVVHHAPYFMSKFEAYEYQFHSLLNVDSTAALTRFAKIVVSLYSVSLVESYDCKSLCSLASEVIVSANLRACFTVVDLWKTFRAILIKEGNRSKGRMRKKYFFELGIKWFLFTNAANVKFLTPGRDGLFVRSLNFDRFIKNCQCNLSFHRGRMALHQTIKGERLESLLDEYELNSHKKFVEKQDVRTVEEIEKEQDPHTFENHENSSPATVGCSLVPCACSTNCFVQNAKVDALHNNLTFHDFIGGARGRGATFFSRDLKGYSYTGFSHESRGWPRFLDDFLDDNIIPKHFYDQCLVQEYSTGHGLAMHRDDEEIYDPNHQVLTVNYSGSAIFCIDCDGTDFEVKLNGPQMLLMPFGFQKDHKHGIKNPSKGRISLTFRLSRSASNQVPVQEVVKVDQDGAVKGASLEKLPSQQTQDESMLGTGVSSVFDEGFSADSSGSSPVQEFMIQIDSSLLEYADKSLSGSSKDLINCDLCLCNSPWLKNEELKFSEALRDLAFASGFNPTDRFSLAKGVSGVRGMNRIISELPSHIFPLRGSMSILDIDDKTVKGNVKEGSFSGFRRWKIVSCSTDLVVIAFLKPKMTQGGELRTHEDECELSDLTEKLHGCSVILSRKFEPDLYHSFDVDADGNCFWHSVGPLIGVDGECIKKILHDQAKRDCVKCPRLSKQLENNVWAEREAVAYFCSHYGIKLNVLYAREECTWIFKPHEVLKAATLICQDNHFKPCMPVNGCVIRAIASALNRREVDVLAVLGKPAHEDLFDEVSEGRGFSIFDLSRLFEIFSICGSVDTGGELIMVNEGGRIPAEFSLEKEHLAHIPTLSRRKFSPIVSDLNRVSNSAMRFLAMNGAEIDYRPSIDRASTLLDSLELGATGVLCQGIKETQKNLSSMLVPEAVHDRKLVMILGTFGCGKSSLFKKFIEKSPGKAITFVSPRRSLAESINNDLGLSRAGGKKSGKSKDLKNVRVKTFELFVLHLDSIKEGHTVVIDEIQLFPPGYIDLIILGLKQNVNIIIAGDPCQSDYDSSSDRHIFAGSESDIMRILSGRTYKFNILSQRFRNPVFVGRLPCNLNKSRLTLDEEEYTLWESIQEFSMMGRKDCPVVLVSSFEEKKIIAAHLGLKMKCITYGESTGLNFQKGAILVTYESALTSDRRWWTALSRFSHDIHFINGMGVTWDNALTHFVGKPLHKFLTKRACNDDIIDLLPGRPELIEGFQSQVGADEGVREAKLVGDPWLKTKIFLGQSPDFELDDFEEVQAAEDWFKTHVPIMGLEAVRAQWVSRLLAKEDREFRIGDITTEQFTDEHSKNRGLELTNAAERYEAIYPRHKGTDTATFLMAVKKRLSFSSPAAEHAKLRRARPFGKFLLDTFLKRVPLDRKHSSEMMEFAVHAFEEKKLSKSMATIENHSGRSCEDWPIDKALIFMKSQLCTKFDNRFRSAKAGQTLACFQHSVLCRFAPYMRYIEAKVVESLPKNLYIHSGKNIDDLASWVRIHKFNGVCTESDYEAFDASQDHFILAFELEVMKYLGLPADLISDYTFIKTHLGSKLGNFAIMRFTGEASTFLFNTMANILFTFLRYDLNGKEAICFAGDDMCANSRLKITNKNSKFLDKIKLKAKVQFTVTPTFCGWGLCEHGVFKKPDLVLERLQIARETRNLENCIDNYAIEVSCAYQMGENLNLYLSPHEMDAHYNCVRFIILHNHLLKSNIKDLFRGEPTIVTL

SEQ ID NO: 476 - DNA, 5190 bp, Lolium latent virus
  source 1..5190: mol_type = other DNA
atgacgactctggccctaaatttggcacagtacaacgaccccatcacaaaaggtatcatcgcacaagagtctctcagacgagtgcgacccgaccttaaagctgtggtcaatgtcaacccctacgccatcccgacttctgctgcactcgtactcgagaaattgggtattggaactcacccaatgtcactcgcagtacacccccacgcaccatgcaaggccattgagaaccagatactgaacacagtgggccatctcctaccaaaggagcagccagtcactttcatggccatgaaaaagagcaaactgaatatgcttcgacgccatccgtcaagggcggacacatttatcaaccccatctaccatcctagagataacgtccggtatggtctagatcctgaccctgatcaggatgcatcaataacagcaagttttctcgaggtgaagactagcacagcatttatgcaagatacactacactatttaacacctgaggatctgctggatatcttcgaaacttccccgaaactagagaacctcattgcatctttcgtactacccgtggaggccacacgcaacatgaagagcctataccccgacttatacagcatccattacacacatggcggctttcaatgggcaccctctgggcacctcggtgacgcatactttcatgaaccgtggcaactctactggctgagatgcggcagccttactcgactgatcgaggaagagacgaccaccactgtacaacccccccctggatttgaaggtgaagcttacaccagggtcaggaaggaagttcgagagctaaagatctacgcagaacgagtcacctcaattggggcccaccacctcttcatctttagccgaaacgccaaagcgacgcccagggtgaggtcctactcacagaacgggaaatgggtgacactgccgcgaatctttcgccccgtaagccacaacgttcagactccactcaagcaggaggtggccaactccctcatgctatacacatatgcagttaggccgtcccttaaagacgtcgctgctaaggtgcgccaaaaatttgatgagaaagacctggcagagcacagtcccttggagatcacacacctcatcaactacatatactacatcgaccagagggcatacctcactaatgacgatgacatcttgtcggacaaccttctgaagaggtggatcttcacacccatccaggcagcatacaagaaggccaaaggcttcctgctggggccggatgacttccaaaaattactcaaagccctggaatggcaacctgtcaccttcgactatgctgtggaccactacaagtcaaacccgtggaggatccacgccagcagaacaggcgctaagatgagacagctcaagaacttcctcagtcgaaccactggactctgtgaggcagttgaggatgatgcactggaaggaagtgaactactgaaggaactcgagggtaacatgtggttccgcaacccctccgaggtagagaaggaggttttcgatgcaatcgtagcagacctcccgccagatagccagagatcagagctaatcctcgaggacccaaacagcaatgcgagggactatctacctattcaacaggaccaaccatcggtgacgcaagggcctgatgaggcagcccaaactcaaaccccgacagccacaagcatggtcacaaatagtgtggcggcccgaatgccccctccagtcccaagaaccctaagggaacaccatgagcaattcccaaccaccgttagagcgtctttcgagcaaccaagcagcacgagagccccagaaacctccgaaaacaacacgcccgctgagtctgtgacgccatcaccaagggccatttatgttggggactttgctatcatggacgcaaatgctagcaccagccgcgccagctcaccttcccccagacgcactgtcgtgagcccccgacagcccgaggcccaaaacgaaacgctgggcagacagatagttagccgggttagcccagcccacgggtgccagatgagcccctacgccgcccagttggcacaccaactaagcgagcaaacggcctacacggatgttataggccaacgcatggttgcattctatagccaacacagtaggagctataaatatggtcggcacgaacaccgcagccaaagttggcttccagttatagatagccttcaggtcgctttggggcttgatgaaagttacgatcactgcctcatccaacgctaccgcaaacatgccagggtagggctgcatgcggatgatgaagaatgctatgagcctgattcaaccattgtaaccctcaacctctacggtaacgcagatttcttaatcgagaggaacacagacaaggcatctgaaactatcacgctccagcacaatgacatgctcttcatgccctcgggaatgcaggtcacacaccgccatgccgtctgcagcttgtatgaggggagagtcagcatcactttccgcaataagaccaaggactacctcaggaaaagcgcaccagatatgaacccggtagagcaaccaggggcctctgcaggacagctcaccggaccgttggaccacagaccagaggaactcccatgggagcattggatcccacgcctcaaccggctaggctttacaggcctacaaaaacaaacagaccctgaaggcaagcttatctaccccatcactgagataagacaggatatggtctatgtccctttcccgaattgctgccctgggccattgaggaaggaccttgaggccatgggccgtcgaccagtcaggtatacagttgatacgggccgcgcactcactctcgccagcgatatcaaaaataatcgtgtcggtgctctgttgcaaaatgctgatctaacgtggaagaccttactggtagagtactgcaggatggagcccacttcggtacccatgactgtaatccacggcgctggtggctcaggcaaatccaaactcctccaagaccacctcaacagggctgagctaaacgtggtgatcatcgtgccaaccagggtactacagcaggactggagaaacaaaatgactgagttcccgagcttcttggttcaaacctacgaggcggcgatgatggagtcagcaccccagatggtcgtctttgatgactacggcaaactacctcacggatacatcgaccttttctgccagttccaccctagcgtggagtatgtcattctcactggagatgcccgtcaatccacctactacgagtacaattcagacgctggcatccggaacctcccaacaaatattgaggtgttcaagcagtattgtggctactacataaactgcacacacagaaacaagcaagacctcgcaaacatgcttggggtttactctgaaaagatgggctcgacacacttcacctttggcaacacatgcgaaactggcagcctactgctagtaccttcagggactcagaagactgttatgggggaggctggccacaagactgagacttacgctgggtgccaaggcatcaccgctgataaggtccagattatgatcgaccatgacacccataaaagtgctgactcacacatgtacactgccctgtccagggcaactgagcatatccacttctacaactccatcgctggtctaaatactgcaagattccatgcgaagctaaatctcacaccatatcttaaaaccttcatccaagtcatcactgagcgggccgcagctgaaacagaacctgcagagtacacggtccaggcacctacagcgaggactcacatccctgtggaaaattgcagtacattcctagagaaagaccttgaagagcagagggccaaggaagaccgggaagtttacacacaggcaggcgccacaaatgtattccagaccaactcaccaatagtccaatgtttccaacaccaacagcccaaggatggagcgctaagtatcatcactcatgcaaaacgcctccagtatgcctccgctgaagccaaccaggctgagtatagagccaaactgcagattggcgccgcactctgggagaactttaagactgccatggaaatcccagacgagccagtaccattcatccgtgacctatgggaacagagcgaggccgaggtcctaagcacctatctatcaaagtctgaaatggccattaagaacgggaagaaccgccaagatccagattggcaggatgagaggatgtttgtctacctcaaggcgcaatgggttactaaggcaagcaagttcaacctcccaacagcgaaagcaggccagacaattagtgcgttcaaacaggcagttgttatgaagtttggagcaatggctcgctacctacgacgcataactccaaagcctgacaacattcgtatcaactgcgagatgcagcctcaggacatatccaagtgggcgctaggcctcgattcacacaatcgccccacgaaacagaaatggaactttgagagaccagcctttgcatctgattttgaggcctttgaccaatcccaggacggggccatgctccacttcgaggccctatgggcgaggcatttcaacgtcccaagctcactcatcgaagagtacctattcctcaaaatgcacgcccaagcaccgaagggctacctcacgatcatgcgtcttacaggggaggggccgacctttgatgcaaacacagcatgctccatagcctacaaccacaccagatacgagatacccaagagctgcatgcaactttacgctggtgacgacatgctacttgatcaagtcccagttgagaagactggcttcaagaacattgcggcaggccttaagctcacggccaaaaccgaaatcttcgaacagaagaggggaaagtggggagagttttgctcctggtggatgaccccctatggccttgtcaaggaccctatcacactgtaccaccggattctccttgcatcagaaattggtgatctctcaaagaaaattgatgcatacgccatcgaggctgagcctgcatatgcactccaaggacgcctcttcgattgctttaacgaggagcagatgaccgcacactatgggaccatcagacgcctcatcatcgaaggcaagaccaacttctccttagatgaccaagcaccccggcaccaggacctccagggcatcctcaactgcatggatgcaaagttcatgtaccattaa

SEQ ID NO: 477 - DNA, 3201 bp, Cassava Colombian symptomless virus
  source 1..3201: mol_type = other DNA
atgttggaaagctttggagccaatcatttattagtctttcaaaggggaaagctgctaaccccaagagttcgcacatttcgcagtgatgagatggtctacctgcctcagatattccatcctgctgaattgaatcaggttcagcccctgaagaagacgttagccatgcagctcttactgtactcaaagagcttgaaaacagtgacattaacagacataatcgcaaagattcgtcaacttatacaaacaaaggaacttgcgaattatgatcccgatgaaattttgcacatggccaactacttctacttcacctctcaagcaccggcattgaatacatacgatgatatcctatccttggatatatttgagaggttgaccttgccactcaaatctagaatagtggcattgtacgagaaactgactggtgcatccgcctttcgacaattacttcaggcattgcaatggagaacaatgacttactccattgaagttgaacatttctatgagggtatttaccctgagcaatggcctgttgatgaacgagagtactcggattctgatgaggaagatggtgaaagcagaccgaatagaaaggaagaaatcaatgacctctcaccaccgtctcccattcctgcctccaccagcaatgcagcatctagctccaacaatccaaatcctcagaccggctctgtcaaactgccatggcaagagcatcttcacatactcaacaaacacggttttagaggaactgaacttcagcgttattgcaatgggttaatcagccctatccttgaagttcgcgacttgcctgttcatgttttcaatgcacatgagagaatgccacccgcactgcttaatcgcctcaagactttaggtagagaacctgtgcgcgtgcccatcctctctagtcgagctgccccatatgcatccgatatcaaaaataatcgagttggggcttactacaggaaattaagtcaggcttggcgagacaaattgtcactagattgtgaaaatggtgacatcaccatccccatgtcagtgatccatggggctggtggatcagggaagagtcaattccttcaagaatggatgactaccctcaaaagagatcacaaggacgttgtcgtggttttacccacaactgaacttagagctgactgggttaggaaggttccaacaatagataatcgcgtcttcaagacttttgagaaagctctggaacgctcttacggaaccattgtaatttttgatgattacggcaaattgcctgctggttatattgaaacattcctctttgctcatagaggatttcaattagccatcttaactggggattcttgccaagctgttcaccatgaacctaaccatcaagcctcatcttacacaacgatcccagcagttgaacatttcggtgcctactccagattttatttgaatgcaacgcaccgaaatcgtaaagatcttgctaacgccctcaatgtctactcagagaaggaaggagtcaccaatattcgtcactcctcctccatcttcgagggtacccctgtgctctgtcctacaacaatcaaacagactgctttaagagagttaggccacaagtcattgacctactcttcatgccagggtttaactgctccaaatatccaaattttgcttgactcaagcaccccacagagctcaaatagggttatgtacactgctctgtctagagcaacagatgcaatcacttttgtatcgacagctaagtgttcaaatgacatgtgggacaaattatcagctactccgtacctcaagaccttcattgagcgtatcaaggaggaacctgcggcatcctccagtgtgcctgagattgaagaactggagccacagatcccaacacacttcccctcaactaataactcattcacacttgaagacttagttgaggagttacctgaaaagcatcaaagggaaatgtttagcccatcttttggctattcaaatgctattcaaacacaagataaggttgtccaacttttccagcatcaacaagctaaagatgacaccttactatgggcaaccattgatgccagattaacaattggcactgctgagtctaatctgaaagaaatgttcatgaagaaagatatcggtgatattcttttccttaactatcagcaagcaatgcagctcccaaaagagagaattccattcaatatcgatctttggagagcttgccaagaggaagtgtcttcgacctatctgtcaaaaccaattggtcagttggttaattctgcaatgcgacaatcacccgactttccgacaaataagatctctttgttcttaaaatctcagtgggtgaagaagacagataaactagggtgtctagtggtaaagcctggccaaaccatcgccagtttcatgcaacaaacagtgatgacctacggagtgatggcccgttatatgagaagaatgaggcaagcatttcagccagacaacattttgatcaattgtgaaatatccccaagagggctgaatgattttgtacttgaaaagtgggacttccaccgtgactcacacgagaatgatttcacagcttttgatcaatcacaaggtggtgctatgctgcaatttgaattaatcaaggcaaaacatcactgtatacctgaagatataatcgaggggtatcgtcaggtgaagcttaatgcccacatcttcctgggcaccctcagcattatgcgtctaacgggagaaggtcccacgtttgacgccaacaccgagtgctccattgcatatcatcatactcggttccatgtccccgcaggctcggcacagctttatgcaggtgatgacatggctcaggactccacaccaacggaaaaagcgtccttctccttgcttaaagagaaattgaagcttacctcaaagactattaggagaaaacaaaaagttggtgactttgctagcttctgtggctggcggataacaccattgggtgttgtcaaggacccccttaaactgctagcgggcctagagttagcggaaagacttggtaaggtgcaagatactgccctcgcttatgcatttgatgcgcaccacgcgtataaacatggcgatcggttgcatgaaatcttcacagaaaaggaagctgattatcatcaagctttagtaaggaaattgcatctgcatcaccaagctgacgccctcatcaggggccccacatag

SEQ ID NO: 478 - DNA, 6555 bp, Apricot latent virus
  source 1..6555: mol_type = other DNA
atggcacttctcaccagaactgctgcagaggaagtaatcgcatcattcacttcagaggaacaatcccgaatttcagctcaagctgtgctaactctggcaaatgtagaaaaggatagacatgatctattcaattatgcattgcctgaattggcaaaggtaaggctttacaattccggaatttacctcagtccacattcctacaaaccccattctcatcccgcatgcaaaactcttgaaaataacattcttttcaatatattacctagttatttggataattctttctatctagtcagcattaagaaaaataaggtcgactttttgaagagaaggcatcctgatcttcagatgatagagaccataaataggtacatatctagtttagataagataaggtatggtagcttttttcatgtcagtccttcaaaagttagtttgaaattcaagtgtgacaggcggactggttttgaaactgatgcatcgctggttgacttaattccaggttgcatggaaggtgctaggaaaaatttcttctttcatgatgaacttcattattggaggaaagaggctctgataacttttctagaccatgttaagccagaaattatgctagcatcaattgtgtatcctcctgaaatacttgctggggctaaagagagtctaaatccttggtgttacacattcaaaatcattgataaggatttagtgttctttcctgatggtgaagagtctgaagcttacattcagcctttgtcaggatcttacttgttaaagacaagtagaattgttactccctccggtcaggtcttcaatcttgatcttatcaaaagtagtttctcccatcacttgatatcaataactaaaggggaagctattggtcagaaaatgagattcttcaatggttttgaggctgtggctatgaagggccttaaccccctgaggcgtaaggttgaaagctgtctgccaatttccaagagtaccatacttaaaatttataggtacctgcgtacactgaagaagcctgatcttcaatcagcaatggctaaacttagccaggtttgcaaagacccaaatggttacgagatcaagttctttgaagagttctcaaaattgtgcctgaaatgtgatactctgaacacaaatatgctccctgacatgaagaggatcgtccaagggtttttcttgaagcttttcccaaaccctattgctagaaacttcaaggtcgttcaacaactccatttggacaacttcattgagaccttagaagatttcagcttctgtgttccaactgaggagctgactcttgactggaaagatgatttggaatttgtcaatttgacttttggtgaaaccgattttgatttagatgaatcctttgattccacttggggtgtgaaaaaagaccatgtcaacatcactgttgtacatcatgcaccatacttcatgtccaaatttgaagcttacgagtatcagtttcattccttactgaatgttgattcaacagctgctctaacaagatttgccaagatagttgtttcactctacagcgttagtcttgtggaatcttatgattgcaaatcattgtgcagcttggcatctgaagtaattgtttccgccaacctacgagcttgcttcacggttgttgacctgtggaaaacgttccgtgccattctgattaaggaggggaatcgatcaaagggtagaatgaggaaaaagtacttttttgaattgggtatcaagtggtttctgttcaccaatgctgcaaatgttaaattcctgactccaggccgagatgggttgtttgtgagatcgctcaactttgaccgattcattaagaattgtcagtgcaacctttcttttcatcgtggtagaatggctcttcatcagactattaaaggtgagaggctggagtcattattggatgagtacgagctcaactctcacaaaaaatttgtagagaagcaagatgtaaggactgttgaggagatagagaaggaacaagatccacacacctttgaaaatcacgagaactcctccccagcaactgtgggttgcagcttggttccctgtgcgtgctcaacaaactgcttcgtgcagaatgcaaaagtggatgctcttcataataatttgactttccatgacttcatagggggtgctcgtggtagaggggccactttcttctctagagatctgaagggttacagttacacaggtttcagtcatgaatctagagggtggcctcgcttccttgatgatttcttggatgataatatcatccctaagcatttttatgatcagtgtttagttcaggaatacagcactgggcatgggctggcaatgcatcgagatgatgaggaaatttatgacccaaatcaccaggtcctgactgttaactatagtggcagtgcaattttttgcattgattgtgatggaactgattttgaagttaaattaaatgggcctcaaatgcttctaatgccctttggcttccaaaaagatcataagcatgggattaagaatccctcaaagggtagaatttcattaaccttccgtctttctaggagtgcctccaaccaggtgcccgttcaggaagttgtaaaggttgatcaagatggtgccgtcaaaggagcttcacttgaaaaattgccaagccagcagactcaggatgaaagtatgctaggaacaggggttagctcagtgtttgatgagggtttttcagcagattcttctggcagctcaccagttcaagaattcatgatacaaatagattcatcactgttagagtatgcagacaaaagtctttcagggtcttcaaaggatcttatcaattgtgacttgtgtctttgtaacagcccttggttaaaaaatgaagagctcaaattctcggaggcacttagagatcttgcttttgcatcaggattcaatcctactgatagattttctctagccaaaggtgtgtcaggtgtccgaggaatgaatagaatcatctctgaattgccatcccacatttttccattgcgaggatcaatgagcattctagatatagatgacaaaactgttaaaggcaatgttaaggaaggctcattctctggctttagaaggtggaagattgttagctgttcaactgatttggtggtgattgccttcttaaaaccaaagatgacacaagggggtgaattaaggacccatgaggatgagtgtgagctttctgatctgactgaaaaactccatggctgctcagtgattttgagtaggaaattcgagcctgacttgtatcattcctttgatgttgatgctgatggtaattgtttctggcattctgtggggcctctaattggcgttgatggggagtgcataaaaaaaattctacatgatcaggcgaaaagagattgcgtcaagtgtccacgcctcagcaaacagcttgaaaataatgtctgggctgagagggaagctgttgcttatttttgctcccattatggaattaaattgaatgtgctctatgctagggaggagtgcacctggatattcaagccgcatgaggtacttaaggctgcaaccttaatttgtcaagacaatcatttcaagccttgcatgcctgtaaatggttgcgtcattagggccattgcttctgctttaaatcggagagaggttgatgttttggcagtccttggcaaacctgcacatgaagatttatttgatgaagtttctgaaggacggggcttcagtatctttgatctctccaggctctttgaaattttttctatttgcgggagtgtggatactggaggtgaattaatcatggttaatgaaggtgggaggatccctgctgaattctctttggaaaaagagcatctagcccacattcccactctttccaggagaaagtttagcccgatcgtgtcagacctaaatcgggtatcaaatagtgccatgagattccttgctatgaatggagctgagattgattataggccatccattgatcgagcttcaaccttgctggatagtttagagcttggtgcgacaggggttttgtgtcaaggtataaaagagactcagaagaacctatcatccatgcttgttccagaggctgtccatgacaggaagttggttatgatccttggaacttttggctgtggtaaaagttctcttttcaaaaaattcattgaaaaatcacccggaaaggcaatcacctttgtttctccaagaagatctcttgccgaatccatcaacaatgacttgggtctctctagggccggaggaaagaaaagtggaaagagtaaagatctcaagaatgtcagagtgaaaacttttgaactctttgtcctgcacttggatagtatcaaagagggccatacagttgtcattgatgagattcaactcttccctcctgggtatattgatttgataattcttgggttgaagcagaatgtcaatataataattgccggggatccctgtcaaagtgactatgatagtagttctgataggcatatttttgctggtagcgagagcgacattatgaggatattgagtggcaggacctataaatttaacattctgagtcaacgattcagaaatcctgttttcgttgggaggctgccatgcaatttgaataagtctcgactaactcttgatgaagaggaatacacactttgggaaagcattcaggaattctcaatgatggggcggaaggattgtccagttgttctggtttcaagctttgaggaaaaaaaaattattgcagcgcatcttggtcttaaaatgaagtgcatcacttatggtgagtcaactggtcttaattttcaaaagggggctattctcgtgacttatgagagtgctttaaccagcgaccgcaggtggtggactgctctatccaggtttagtcatgatattcattttataaatggaatgggggtcacttgggacaatgccttgacacattttgttggtaaacccctgcataagtttttaaccaagagagcttgcaatgatgacattattgatctgttacctggccgcccagagctgattgaaggttttcagagccaagttggggcagatgagggcgttcgagaggctaaactagttggagatccctggttaaagactaagatcttccttggccagtctccagactttgaattagatgattttgaagaggtccaagcagcggaggattggttcaagactcatgtgccaataatggggctcgaggctgttagggctcaatgggtcagcaggttgctagctaaggaggatcgagaattccgaattggggacatcaccacagaacagttcactgatgaacacagtaaaaatagggggcttgaactcaccaacgcagctgaaaggtatgaagccatttacccaagacataagggaactgataccgccacgttcttaatggctgtaaagaaaaggttaagcttctcctctccagctgctgaacatgccaaattgaggagggctcgcccctttggaaaatttctccttgatacctttttgaagagagtccctttggatcgcaagcatagcagtgaaatgatggaatttgctgttcatgcctttgaagagaaaaaactctcaaagagtatggccactattgagaaccattctggtcgttcctgtgaggattggccaatcgataaagctttgatattcatgaagtctcaattgtgcacgaaatttgacaacagattccgaagtgccaaggccggacaaactttagcttgctttcaacattctgtcttgtgcagatttgccccttatatgagatacatagaagcaaaagtggtggagtcactcccaaaaaatctctacattcactctgggaagaatattgatgatctggcatcctgggtcagaattcacaaattcaatggtgtgtgtacagaatctgactacgaggcttttgatgcatcacaggaccacttcattctggcctttgaattggaagtcatgaaatatcttggtttgccagcagatttgatttcagattacacattcatcaaaactcaccttgggtcaaaacttggtaattttgccataatgcgattcactggtgaagccagcacttttctattcaataccatggctaatatactattcacctttttgaggtatgaccttaacggaaaggaggcaatttgtttcgctggtgatgacatgtgtgcaaactcaaggctaaaaataaccaataaaaattccaagtttttggacaagattaaactgaaggccaaagtccagttcactgtaactccaacattctgtggttggggactttgcgagcatggggtttttaaaaagccggatttggttcttgaaagacttcaaattgcgagggagacccggaaccttgaaaattgcattgataattatgctattgaagtttcctgtgcctaccagatgggtgaaaatctgaatctctacctctcccctcatgagatggatgctcattacaactgtgtgaggttcatcattttgcacaatcaccttctgaaatcaaacataaaagatctctttagaggtgagccaaccattgtcactctttaa

SEQ ID NO: 479 - protein, 293 aa, Lolium latent virus
MSESKAETPSKSAEKGVASLSTSAPPSSTTPTAQAKQTPPPVATTARPMASRLPRTIAAEGGGTEKKQSHLAEDRIAQYLPKQDAVDHSNLAALLQPFTEASYEREFDVKVNGIASKAELTAVAETWASRLNVPKENSAVLAQEIAIHCYHNGSSEQTDFNLKSSQVAGLNLEAAVGVIKEILTLRQFAAYYATFVWNWGIKNEIPPANWVAKGYTDETKYAAFDTFSYVGSPLGLRITPTRKPTNNEYMAASVNAREKIIQSRGKGMVTNSPMFSDGTTHQGIPLHPKLPLS

SEQ ID NO: 480 - protein, 221 aa, Cassava Colombian symptomless virus
MEETRQPARPVTSNTAFNAGDMCSAPSLSDLDNVHHTSMNASIATSDQIKAIGALWVQLGVPQASLAFTAWDMARHCADIQATKTSTMIGISPYCGLARSLLAGTIKSVTTMRRFCSYYAKVVWNMLLKENKPPANWAKMGFLEETKFAAFDFFDAVLSPAALEPKGGLIREPTQLEITAYQTAKFVALNRAEVHRGNLTSNLAEVTRGQVGTKPTIQLLN

SEQ ID NO: 481 - protein, 421 aa, Apricot latent virus
MATSGQDTTSANPAVTRNEETPVVTEVQATNAVATTPEVVPVATAPLPASTQPTATTSSFEVSFTPATSISATPMTFPEPVVSQLVPFPPLVATGQSSVQTTAVPDTSRLQQMAAANRGFSEGLRVHPLPITPASSNPFTTGNIFTSSVFSGRGSNAATSSEAIGEPTPQRVFQSSQGSNPPAQGHYSQQHTSGSVGNVITPFTLGNRAPRRAASSIGGTRRRLDSVGLKSIMYEPQAGVVATDAKMRAIGRALIEMGIREDQLTEVGVYLARHCADVGASDKSTLLGTFPGSDITLEEVGTRIKQTEGCTLRQYCAYYAKHVWNLMLQTQKPPANWVGKEFKFETRYAAFDFFFGVESSAALEPADGLIRLPTQSERVANNTSKEIQMYRIRSMEGTQAVNFGEVTGGKIGPKPVLSIKK

SEQ ID NO: 482 - DNA, 882 bp, Lolium latent virus
  source 1..882: mol_type = other DNA
atgtcagaatccaaagcagagacgcctagcaaatcagctgagaagggtgtagcaagtctgagcaccagtgcaccccctagcagcaccacaccaacagcccaagccaaacaaacaccaccgcctgtggcaaccactgctagacccatggcatcacgcctgcccaggaccattgcggctgagggtggtggaactgaaaagaagcaatcccatcttgcggaggaccgcatcgcccaatacctcccaaaacaggatgcggtcgaccacagcaatctcgctgcactcctccaacctttcacagaggcaagctatgaacgcgagttcgatgttaaggtcaacggcattgccagcaaggccgaactcacggcggtggccgagacatgggcttcaagactcaacgtgccgaaagaaaactcagccgtcctcgctcaggagatagccatacactgctaccacaatggctcatctgaacagaccgacttcaacctcaagagcagccaggtcgcaggactgaatcttgaagctgctgtgggcgtaattaaagagatccttacactaagacagtttgcagcgtactatgcgacctttgtctggaactggggcattaagaatgaaataccaccagccaactgggtggccaagggatacactgatgagacgaaatacgccgcctttgacaccttcagctatgtaggttcaccccttgggctcaggatcacaccaacaaggaaaccaaccaacaacgagtatatggctgccagcgtgaacgccagggagaaaattatccaatccagggggaagggcatggtcaccaacagccccatgtttagcgatggcaccacccaccagggaataccgctgcaccccaaattaccactcagctag

SEQ ID NO: 483 - DNA, 666 bp, Cassava Colombian symptomless virus
  source 1..666: mol_type = other DNA
atggaagaaacaagacaacctgcgcgtcctgtcacttctaacacagcattcaatgctggagatatgtgtagtgcccccagcctctctgatcttgataatgttcaccacacttcaatgaatgcatcaatagcaacctctgatcaaattaaagctattggtgcgctttgggtgcaacttggtgtcccccaagcctctttagcattcactgcttgggatatggcgcgtcactgtgctgacattcaagcaacaaagacttccacaatgatagggatatctccatactgcggcctagctcgctcactcttagcgggcacgattaaaagtgtcacgacgatgcgcaggttttgctcatattatgctaaagtcgtttggaatatgctcctgaaagaaaataaaccgccagctaactgggccaagatgggtttccttgaggagacaaaattcgcagcgttcgacttctttgacgccgtgctcagcccagctgctttagaaccgaaaggtggcttaatccgggagccgacacaattggagatcacagcctatcaaactgcaaaatttgtggcactaaatagagctgaggtacacaggggcaatctcacctctaatctggctgaagttacacgtggtcaagttggtactaaaccaacaatccagctgcttaattga

SEQ ID NO: 484 - DNA, 1266 bp, Apricot latent virus
  source 1..1266: mol_type = other DNA
atggcaacaagcgggcaagacacaacaagtgccaatccagctgtgaccagaaatgaagaaacgccagtggtaacagaggttcaagctactaatgctgtagccaccactcctgaagtagtacctgttgctactgctccactgcctgcgtccacgcagccgactgctacgacgtccagctttgaggtctccttcactcctgctacctcaatttccgcgactcctatgacgtttcctgagcctgttgtatcacagttggtgccttttccacctttagttgcaactggccaaagctcagtgcaaacaactgctgttcctgacacttcaaggctgcagcagatggccgctgcaaataggggctttagtgagggtctcagagtgcacccactacccataactccggcaagctcaaatcctttcacaactgggaatatttttaccagctctgtattctctgggcgaggttctaacgccgctacatcttcagaagctattggagaacctactcctcagagggtgtttcaatcatcacagggttcaaatcctcctgctcagggtcattattcacaacaacacacatctggtagtgttgggaatgtgatcacccccttcactcttggaaatagagccccaagaagggcagcttcatcaatagggggaactagaaggaggctggattcagttggactcaagagtataatgtacgaacctcaagctggtgtggttgccactgacgcaaagatgagagccattggtagagccctcatagagatgggaatcagggaggatcagctcactgaagttggggtttacctcgccaggcactgtgcagacgttggcgcttctgataaatccactctcttgggtacttttcctgggtctgatataacgctggaagaggttggtacgaggatcaagcagactgaaggttgcaccctcaggcaatactgtgcgtactatgcgaagcatgtttggaatctaatgcttcaaactcagaaaccaccagcaaactgggttgggaaggagtttaaatttgaaacaagatatgcagctttcgacttcttctttggagttgagagttctgctgctttggagccagctgatggtttgataaggctcccgacccaatctgagagggttgcgaacaacaccagcaaagaaatacagatgtaccgcatcagatcgatggaggggactcaagccgtgaactttggggaagtcactggcggcaaaataggaccaaagcctgttttgtcaataaagaaataa

SEQ ID NO: 485 - DNA, 2823 bp, synthetic construct
  source 1..2823: mol_type = other DNA
gtcattggaaccatctctgtacaacattaactataattttaatggttttcagtacttaccgggctcacatggtgggggttcataccaccatgaattcaaagacttggaatggctcaaagtaggttacattaccgagaaacacaaagaaggcgatgtttggcagcctcgtgaaaataatcagaaatacactactagtatttttacaacaattaccaacaacaacaaacaacaaacaacattacaattactatttacaattacacacaaacacgtttttattccggctgtgtagtctttcaacgttgtcttccgatgcccgtgtttccaaacttcagccaagaaatcgtctaagcctaaccttttccaaatctcatactcgactgcacaatgaaattcgttctgtgatttgtcatacttggaaatgtctagctctaatatgtccataggaacattagagtccagatctgagaaaaattcttcgatctgtgtaggcgttttccttgtataaaacatgaatcttgaactgtcaattgtctctagcagctgtcttgttaattctgaaaatacaggaccaaaaagcgcattgattttcttgctatgatacacaatagtttgcaaagccgggtattcagtttgaatactaagatccaaacgctgtttcggctgctgcttgatcatgtgcctgtattgatcaacggctggtaaatcaataaagtcaaaatcagccaactggccaattgttgacttctcttgcttttcgatccatctttccaaactcgcccttgaaagcagaggtatattttttggttttttcttttctttaattaagtatgcatcaaaaaacttatctactactagagaagcggtgtcttcgatgtcaacaacccctactaattcgggagagttgaaatttcttttgatcatcgcgaccaaattttccaacaatccaggttttcgaggtttttcagcagcagtcctgatcacaggtttcaatgtcgtctcagattctctcggaagaggcaccgatttcgacatatccaacacacaatccttgacattcaaactattctctcgtatttgcatagttacagcatcatactcattgagtatagtactgtttcccggcaaacacttgtcgtaataatattgcatgtcagaaacatctcctgtttttggtgctgcgacgaaaaggttaacacctttgtacaccgattctatctgtaattgctattgagtcgacggtagtcaagatgcataataaataacggattgtgtccgtaatcacacgtggtgcgtacgataacgcatagtgtttttccctccacttaaatcgaagggttgtgtcttggatcgcgcgggtcaaatgtatatggttcatatacatccgcaggcacgtaataaagcgaggggttcgaatccccccgttacccccggtaggggcccaagcacaacatttcaaccagaaacactagccgaagcaaatccattccacaagcacctggtgggatcatctcatcatcagaaaccaagagagagattccgtgtccgcttgttgtagtagattgtgaggactgaggaccgagaagcagccatggctctagttgttaaaggaaaagtgaatatcaatgagtttatcgacctgacaaaaatggagaagatcttaccgtcgatgtttacccctgtaaagagtgttatgtgttccaaagttgataaaataatggttcatgagaatgagtcattgtcagaggtgaaccttcttaaaggagttaagcttattgatagtggatacgtctgtttagccggtttggtcgtcacgggcgagtggaacttgcctgacaattgcagaggaggtgtgagcgtgtgtctggtggacaaaaggatggaaagagccgacgaggccactctcggatcttactacacagcagctgcaaagaaaagatttcagttcaaggtcgttcccaattatgctataaccacccaggacgcgatgaaaaacgtctggcaagttttagttaatattagaaatgtgaagatgtcagcgggtttctgtccgctttctctggagtttgtgtcggtgtgtattgtttatagaaataatataaaattaggtttgagagagaagattacaaacgtgagagacggagggcccatggaacttacagaagaagtcgttgatgagttcatggaagatgtccctatgtcgatcaggcttgcaaagtttcgatctcgaaccggaaaaaagagtgatgtccgcaaagggaaaaatagtagtaatgatcggtcagtgccgaacaagaactatagaaatgttaaggattttggaggaatgagttttaaaaagaataatttaatcgatgatgattcggaggctactgtcgccgaatcggattcgttttaaagacgcatccatggctgaatggttaaagcgcccaactcataattggcgaattcgtaggttcaattcctactggatgcaaagacgctaactccctcggactgttggataaccgaggataaataatccatgtttagtcctcctagctagggactcttagtcatatagctagcatctgttggtaccgagataaccaacattaaataactcggttttcaggcatgcttcagcgtttgtggtgcctgtcatactaacgctatatattaactaggattagttatatattaatcgccataatggctaggtgaaggaaaacacctccaacgagaagttggtttaaaccgcacgtcgaagctatacgtaaaacttaaacagcgtgcttcataggtccaggaggagacctataaaaaaaaaaaaaaaaaaaaaaa

SEQ ID NO: 486 - DNA, 5476 bp, synthetic construct
  source 1..5476: mol_type = other DNA
gtcattggaaccatctctgtacaacattaactataattttaatggttttcagtacttaccgggctcacatggtgggggttcataccaccatgaattcaaagacttggaatggctcaaagtaggttacattaccgagaaacacaaagaaggcgatgtttggcagcctcgtgaaaataatcagaaatacactactagtatttttacaacaattaccaacaacaacaaacaacaaacaacattacaattactatttacaattacaaagctgactatgtgatcttattaaaattaggttaaatttcgaggttaaaaatagttttaatattgctatagtcttagaggtcttgtatatttatacttaccacacaagatggaccggagcagccctccaatatctagtgtaccctcgtgctcgctcaaacattaagtggtgttgtgcgaaaagaatctcacttcaaatggcatcttcttcttcttcttctagatggagctatgatgttttcttaagttttagaggcgaagatactcgaaaaacgtttacaagtcacttatacgaagtcttgaatgataagggaataaaaacctttcaagatgataaaaggctagagtacggcgcaaccatcccaggtgaactctgtaaagctatagaagagtctcaatttgccattgttgttttctcagagaattatgcaacatcaaggtggtgtttgaatgaactagtgaagatcatggaatgcaaaactcgatttaagcaaactgttataccgatattctatgatgtggatccatcacatgttcggaaccaaaaggagagctttgcaaaagcctttgaagaacatgaaacaaagtataaggatgatgttgagggaatacaaagatggaggattgctttaaatgaagcggccaatctcaaaggctcctgtgataatcgtgacaagactgatgcagactgtattcgacagattgttgaccaaatctcatccaaattatgcaagatttctttatcttatttgcaaaacattgttggaatagatactcatttagagaaaatagaatccttactagagataggaatcaatggtgttcggattatggggatctggggaatggggggagtcggtaaaacaacaatagcaagagctatatttgatactcttttaggaagaatggatagttcctatcaatttgatggtgcttgtttccttaaggatattaaagaaaacaaacgtggaatgcattctttgcaaaatgcccttctctctgaacttttaagggaaaaagctaattacaataatgaggaggatggaaagcaccaaatggctagtagacttcgttcgaagaaggtcctaattgtgcttgatgatatagataataaagatcattatttggagtatttagcaggtgatcttgattggtttggtaatggtagtagaattattataacaactagagacaagcatttgatagagaagaatgatataatatatgaggtgactgcactacccgatcatgaatccattcaattgttcaaacaacatgctttcggaaaagaagttccaaatgagaattttgagaagctttcattagaggtagtaaattatgctaaaggccttcctttagccctcaaagtgtggggttctttgctgcataacctacgattaactgaatggaaaagtgctatagagcacatgaaaaataactcttattctggaattattgataagctcaaaataagttatgatggattagagcccaaacaacaagagatgtttttagatatagcatgcttcttgcgaggggaagaaaaagattacatcctacaaatccttgagagttgtcatattggagctgaatacgggttacgtattttaattgacaaatctcttgtgttcatctctgaatataatcaggttcaaatgcatgacttaatacaggatatgggtaaatatatagtgaattttcaaaaagatcccggagaacgtagcagattatggctcgccaaggaagtcgaagaagtgatgagcaacaacacagggaccatggcaatggaagcaatttgggtttcttcttattctagtactctacgctttagcaatcaggccgtgaaaaatatgaaaaggcttagggtatttaacatggggaggtcgtcgacacattatgccatcgattatctgcccaacaacttgcgttgttttgtttgcactaactatccttgggagtcatttccatctacatttgaactcaaaatgcttgttcacctccaactccgacacaattctctgcgtcatttatggacagaaacaaagcatttgccgtctctacggaggatagatctcagctggtctaaaagattgacgcgaacaccagatttcacggggatgccaaatttggagtatgtgaatttgtatcaatgtagtaatcttgaagaagttcaccattccctgggatgttgcagcaaagtcattggtttatatttgaatgattgtaaaagccttaagaggtttccatgtgttaacgtggaatctcttgaatatctgggtctaagaagttgcgatagtttagagaaattgccagaaatctacgggagaatgaagccggagatacagattcacatgcaaggctctgggataagggaactaccatcatctatttttcagtacaaaactcatgttaccaagctattgttgtggaatatgaaaaaccttgtagctcttccaagcagcatatgtaggttgaaaagtttggttagtctgagtgtgtcgggttgctcaaaacttgaaagcttgccagaagagataggggatttagacaacttacgggtgtttgatgccagtgatactctaattttacgacctccgtcttccatcatacgcttgaacaaacttataatcttgatgtttcgaggcttcaaagatggagtgcactttgagttccctcctgtggctgaaggattacactcattggaatatctgaatctcagttactgcaatctaatagatggaggacttccggaagagattggatccttatcctctttgaaaaagttggatctcagtagaaataattttgagcatttgccttcaagtatagcccaacttggtgctcttcaatccttagacttaaaagattgccagaggcttacacagctaccagaacttcccccagaattaaatgaattgcatgtagattgtcatatggctctgaaatttatccattatttagtaacaaagagaaagaaactacatagagtgaaacttgatgatgcacacaatgatactatgtacaatttgtttgcatataccatgtttcagaatatctcttccatgaggcatgacatctctgcttcagattccttgtcactaacagtatttaccggtcaaccgtatcctgaaaagatcccgagttggttccaccatcagggttgggatagtagtgtatcagtcaatttgcctgaaaattggtatatacctgataaattcttgggatttgctgtatgttactctcgtagcttaattgacacaacagctcacttgattcccgtatgtgatgacaagatgtcgcgcatgacccagaaacttgccttatcagaatgtgatacagaatcatccaactattcagaatgggatatacattttttctttgtaccttttgctggcttatgggatacatctaaggcaaatggaaaaacaccaaatgattatgggattattaggctatctttttctggagaagagaagatgtatggacttcgtttgttgtataaagaaggaccagaggttaatgccttgttacaaatgagggaaaatagcaatgaaccaacagaacattccactgggataaggaggactcaatataacaacagaacttccttttatgagctcatcaatgggtgaggtagtcaagatgcataataaataacggattgtgtccgtaatcacacgtggtgcgtacgataacgcatagtgtttttccctccacttaaatcgaagggttgtgtcttggatcgcgcgggtcaaatgtatatggttcatatacatccgcaggcacgtaataaagcgaggggttcgaatccccccgttacccccggtaggggcccaagcacaacatttcaaccagaaacactagccgaagcaaatccattccacaagcacctggtgggatcatctcatcatcagaaaccaagagagagattccgtgtccgcttgttgtagtagattgtgaggactgaggaccgagaagcagccatggctctagttgttaaaggaaaagtgaatatcaatgagtttatcgacctgacaaaaatggagaagatcttaccgtcgatgtttacccctgtaaagagtgttatgtgttccaaagttgataaaataatggttcatgagaatgagtcattgtcagaggtgaaccttcttaaaggagttaagcttattgatagtggatacgtctgtttagccggtttggtcgtcacgggcgagtggaacttgcctgacaattgcagaggaggtgtgagcgtgtgtctggtggacaaaaggatggaaagagccgacgaggccactctcggatcttactacacagcagctgcaaagaaaagatttcagttcaaggtcgttcccaattatgctataaccacccaggacgcgatgaaaaacgtctggcaagttttagttaatattagaaatgtgaagatgtcagcgggtttctgtccgctttctctggagtttgtgtcggtgtgtattgtttatagaaataatataaaattaggtttgagagagaagattacaaacgtgagagacggagggcccatggaacttacagaagaagtcgttgatgagttcatggaagatgtccctatgtcgatcaggcttgcaaagtttcgatctcgaaccggaaaaaagagtgatgtccgcaaagggaaaaatagtagtaatgatcggtcagtgccgaacaagaactatagaaatgttaaggattttggaggaatgagttttaaaaagaataatttaatcgatgatgattcggaggctactgtcgccgaatcggattcgttttaaagacgcatccatggctgaatggttaaagcgcccaactcataattggcgaattcgtaggttcaattcctactggatgcaaagacgctaactccctcggactgttggataaccgaggataaataatccatgtttagtcctcctagctagggactcttagtcatatagctagcatctgttggtaccgagataaccaacattaaataactcggttttcaggcatgcttcagcgtttgtggtgcctgtcatactaacgctatatattaactaggattagttatatattaatcgccataatggctaggtgaaggaaaacacctccaacgagaagttggtttaaaccgcacgtcgaagctatacgtaaaacttaaacagcgtgcttcataggtccaggaggagacctataaaaaaaaaaaaaaaaaaaaaaa

SEQ ID NO: 487 - DNA, 2551 bp, synthetic construct
  source 1..2551: mol_type = other DNA
gtcattggaaccatctctgtacaacattaactataattttaatggttttcagtacttaccgggctcacatggtgggggttcataccaccatgaattcaaagacttggaatggctcaaagtaggttacattaccgagaaacacaaagaaggcgatgtttggcagcctcgtgaaaataatcagaaatacactactacacaaacacgtttttattccggctgtgtagtctttcaacgttgtcttccgatgcccgtgtttccaaacttcagccaagaaatcgtctaagcctaaccttttccaaatctcatactcgactgcacaatgaaattcgttctgtgatttgtcatacttggaaatgtctagctctaatatgtccataggaacattagagtccagatctgagaaaaattcttcgatctgtgtaggcgttttccttgtataaaacatgaatcttgaactgtcaattgtctctagcagctgtcttgttaattctgaaaatacaggaccaaaaagcgcattgattttcttgctatgatacacaatagtttgcaaagccgggtattcagtttgaatactaagatccaaacgctgtttcggctgctgcttgatcatgtgcctgtattgatcaacggctggtaaatcaataaagtcaaaatcagccaactggccaattgttgacttctcttgcttttcgatccatctttccaaactcgcccttgaaagcagaggtatattttttggttttttcttttctttaattaagtatgcatcaaaaaacttatctactactagagaagcggtgtcttcgatgtcaacaacccctactaattcgggagagttgaaatttcttttgatcatcgcgaccaaattttccaacaatccaggttttcgaggtttttcagcagcagtcctgatcacaggtttcaatgtcgtctcagattctctcggaagaggcaccgatttcgacatatccaacacacaatccttgacattcaaactattctctcgtatttgcatagttacagcatcatactcattgagtatagtactgtttcccggcaaacacttgtcgtaataatattgcatgtcagaaacatctcctgtttttggtgctgcgacgaaaaggttaacacctttgtacaccgattctatctgtaattgctattgagtcgacagcacaacatttcaaccagaaacactagccgaagcaaatccattccacaagcacctggtgggatcatctcatcatcagaaaccaagagagagattccgtgtccgcttgttgtagtagattgtgaggactgaggaccgagaagcagccatggctctagttgttaaaggaaaagtgaatatcaatgagtttatcgacctgacaaaaatggagaagatcttaccgtcgatgtttacccctgtaaagagtgttatgtgttccaaagttgataaaataatggttcatgagaatgagtcattgtcagaggtgaaccttcttaaaggagttaagcttattgatagtggatacgtctgtttagccggtttggtcgtcacgggcgagtggaacttgcctgacaattgcagaggaggtgtgagcgtgtgtctggtggacaaaaggatggaaagagccgacgaggccactctcggatcttactacacagcagctgcaaagaaaagatttcagttcaaggtcgttcccaattatgctataaccacccaggacgcgatgaaaaacgtctggcaagttttagttaatattagaaatgtgaagatgtcagcgggtttctgtccgctttctctggagtttgtgtcggtgtgtattgtttatagaaataatataaaattaggtttgagagagaagattacaaacgtgagagacggagggcccatggaacttacagaagaagtcgttgatgagttcatggaagatgtccctatgtcgatcaggcttgcaaagtttcgatctcgaaccggaaaaaagagtgatgtccgcaaagggaaaaatagtagtaatgatcggtcagtgccgaacaagaactatagaaatgttaaggattttggaggaatgagttttaaaaagaataatttaatcgatgatgattcggaggctactgtcgccgaatcggattcgttttaaagacgcatccatggctgaatggttaaagcgcccaactcataattggcgaattcgtaggttcaattcctactggatgcaaagacgctaactccctcggactgttggataaccgaggataaataatccatgtttagtcctcctagctagggactcttagtcatatagctagcatctgttggtaccgagataaccaacattaaataactcggttttcaggcatgcttcagcgtttgtggtgcctgtcatactaacgctatatattaactaggattagttatatattaatcgccataatggctaggtgaaggaaaacacctccaacgagaagttggtttaaaccgcacgtcgaagctatacgtaaaacttaaacagcgtgcttcataggtccaggaggagacctataaaaaaaaaaaaaaaaaaaaaaa

SEQ ID NO: 488 - DNA, 5204 bp, synthetic construct
  source 1..5204: mol_type = other DNA
gtcattggaaccatctctgtacaacattaactataattttaatggttttcagtacttaccgggctcacatggtgggggttcataccaccatgaattcaaagacttggaatggctcaaagtaggttacattaccgagaaacacaaagaaggcgatgtttggcagcctcgtgaaaataatcagaaatacactactaaagctgactatgtgatcttattaaaattaggttaaatttcgaggttaaaaatagttttaatattgctatagtcttagaggtcttgtatatttatacttaccacacaagatggaccggagcagccctccaatatctagtgtaccctcgtgctcgctcaaacattaagtggtgttgtgcgaaaagaatctcacttcaaatggcatcttcttcttcttcttctagatggagctatgatgttttcttaagttttagaggcgaagatactcgaaaaacgtttacaagtcacttatacgaagtcttgaatgataagggaataaaaacctttcaagatgataaaaggctagagtacggcgcaaccatcccaggtgaactctgtaaagctatagaagagtctcaatttgccattgttgttttctcagagaattatgcaacatcaaggtggtgtttgaatgaactagtgaagatcatggaatgcaaaactcgatttaagcaaactgttataccgatattctatgatgtggatccatcacatgttcggaaccaaaaggagagctttgcaaaagcctttgaagaacatgaaacaaagtataaggatgatgttgagggaatacaaagatggaggattgctttaaatgaagcggccaatctcaaaggctcctgtgataatcgtgacaagactgatgcagactgtattcgacagattgttgaccaaatctcatccaaattatgcaagatttctttatcttatttgcaaaacattgttggaatagatactcatttagagaaaatagaatccttactagagataggaatcaatggtgttcggattatggggatctggggaatggggggagtcggtaaaacaacaatagcaagagctatatttgatactcttttaggaagaatggatagttcctatcaatttgatggtgcttgtttccttaaggatattaaagaaaacaaacgtggaatgcattctttgcaaaatgcccttctctctgaacttttaagggaaaaagctaattacaataatgaggaggatggaaagcaccaaatggctagtagacttcgttcgaagaaggtcctaattgtgcttgatgatatagataataaagatcattatttggagtatttagcaggtgatcttgattggtttggtaatggtagtagaattattataacaactagagacaagcatttgatagagaagaatgatataatatatgaggtgactgcactacccgatcatgaatccattcaattgttcaaacaacatgctttcggaaaagaagttccaaatgagaattttgagaagctttcattagaggtagtaaattatgctaaaggccttcctttagccctcaaagtgtggggttctttgctgcataacctacgattaactgaatggaaaagtgctatagagcacatgaaaaataactcttattctggaattattgataagctcaaaataagttatgatggattagagcccaaacaacaagagatgtttttagatatagcatgcttcttgcgaggggaagaaaaagattacatcctacaaatccttgagagttgtcatattggagctgaatacgggttacgtattttaattgacaaatctcttgtgttcatctctgaatataatcaggttcaaatgcatgacttaatacaggatatgggtaaatatatagtgaattttcaaaaagatcccggagaacgtagcagattatggctcgccaaggaagtcgaagaagtgatgagcaacaacacagggaccatggcaatggaagcaatttgggtttcttcttattctagtactctacgctttagcaatcaggccgtgaaaaatatgaaaaggcttagggtatttaacatggggaggtcgtcgacacattatgccatcgattatctgcccaacaacttgcgttgttttgtttgcactaactatccttgggagtcatttccatctacatttgaactcaaaatgcttgttcacctccaactccgacacaattctctgcgtcatttatggacagaaacaaagcatttgccgtctctacggaggatagatctcagctggtctaaaagattgacgcgaacaccagatttcacggggatgccaaatttggagtatgtgaatttgtatcaatgtagtaatcttgaagaagttcaccattccctgggatgttgcagcaaagtcattggtttatatttgaatgattgtaaaagccttaagaggtttccatgtgttaacgtggaatctcttgaatatctgggtctaagaagttgcgatagtttagagaaattgccagaaatctacgggagaatgaagccggagatacagattcacatgcaaggctctgggataagggaactaccatcatctatttttcagtacaaaactcatgttaccaagctattgttgtggaatatgaaaaaccttgtagctcttccaagcagcatatgtaggttgaaaagtttggttagtctgagtgtgtcgggttgctcaaaacttgaaagcttgccagaagagataggggatttagacaacttacgggtgtttgatgccagtgatactctaattttacgacctccgtcttccatcatacgcttgaacaaacttataatcttgatgtttcgaggcttcaaagatggagtgcactttgagttccctcctgtggctgaaggattacactcattggaatatctgaatctcagttactgcaatctaatagatggaggacttccggaagagattggatccttatcctctttgaaaaagttggatctcagtagaaataattttgagcatttgccttcaagtatagcccaacttggtgctcttcaatccttagacttaaaagattgccagaggcttacacagctaccagaacttcccccagaattaaatgaattgcatgtagattgtcatatggctctgaaatttatccattatttagtaacaaagagaaagaaactacatagagtgaaacttgatgatgcacacaatgatactatgtacaatttgtttgcatataccatgtttcagaatatctcttccatgaggcatgacatctctgcttcagattccttgtcactaacagtatttaccggtcaaccgtatcctgaaaagatcccgagttggttccaccatcagggttgggatagtagtgtatcagtcaatttgcctgaaaattggtatatacctgataaattcttgggatttgctgtatgttactctcgtagcttaattgacacaacagctcacttgattcccgtatgtgatgacaagatgtcgcgcatgacccagaaacttgccttatcagaatgtgatacagaatcatccaactattcagaatgggatatacattttttctttgtaccttttgctggcttatgggatacatctaaggcaaatggaaaaacaccaaatgattatgggattattaggctatctttttctggagaagagaagatgtatggacttcgtttgttgtataaagaaggaccagaggttaatgccttgttacaaatgagggaaaatagcaatgaaccaacagaacattccactgggataaggaggactcaatataacaacagaacttccttttatgagctcatcaatgggtgaagcacaacatttcaaccagaaacactagccgaagcaaatccattccacaagcacctggtgggatcatctcatcatcagaaaccaagagagagattccgtgtccgcttgttgtagtagattgtgaggactgaggaccgagaagcagccatggctctagttgttaaaggaaaagtgaatatcaatgagtttatcgacctgacaaaaatggagaagatcttaccgtcgatgtttacccctgtaaagagtgttatgtgttccaaagttgataaaataatggttcatgagaatgagtcattgtcagaggtgaaccttcttaaaggagttaagcttattgatagtggatacgtctgtttagccggtttggtcgtcacgggcgagtggaacttgcctgacaattgcagaggaggtgtgagcgtgtgtctggtggacaaaaggatggaaagagccgacgaggccactctcggatcttactacacagcagctgcaaagaaaagatttcagttcaaggtcgttcccaattatgctataaccacccaggacgcgatgaaaaacgtctggcaagttttagttaatattagaaatgtgaagatgtcagcgggtttctgtccgctttctctggagtttgtgtcggtgtgtattgtttatagaaataatataaaattaggtttgagagagaagattacaaacgtgagagacggagggcccatggaacttacagaagaagtcgttgatgagttcatggaagatgtccctatgtcgatcaggcttgcaaagtttcgatctcgaaccggaaaaaagagtgatgtccgcaaagggaaaaatagtagtaatgatcggtcagtgccgaacaagaactatagaaatgttaaggattttggaggaatgagttttaaaaagaataatttaatcgatgatgattcggaggctactgtcgccgaatcggattcgttttaaagacgcatccatggctgaatggttaaagcgcccaactcataattggcgaattcgtaggttcaattcctactggatgcaaagacgctaactccctcggactgttggataaccgaggataaataatccatgtttagtcctcctagctagggactcttagtcatatagctagcatctgttggtaccgagataaccaacattaaataactcggttttcaggcatgcttcagcgtttgtggtgcctgtcatactaacgctatatattaactaggattagttatatattaatcgccataatggctaggtgaaggaaaacacctccaacgagaagttggtttaaaccgcacgtcgaagctatacgtaaaacttaaacagcgtgcttcataggtccaggaggagacctataaaaaaaaaaaaaaaaaaaaaaa

SEQ ID NO: 489 - DNA, 2061 bp, synthetic construct
  source 1..2061: mol_type = other DNA
gtcattggaaccatctctgtacaacattaactataattttaatggttttcagtacttaccgggctcacatggtgggggttcataccaccatgaattcaaagacttggaatggctcaaagtaggttacattaccgagaaacacaaagaaggcgatgtttggcagcctcgtgaaaataatcagaaatacactactaatggtcggtatgggacaaaaggactcatacgtaggagatgaagcccaaagcaaaagaggtatcctcaccctgaaataccccatcgaacacggtatcatcaccaactgggatgacatggaaaagatctggcaccacaccttctacaacgaactccgtgtcgctccagaagaacacccagtccttctcactgaagctccactcaaccccaaagccaacagggagaagatgacccaaatcatgtttgagaccttcaacacacccgccatgtatgtagccatccaagctgtactctccttgtacgcttctggtcgtaccaccggtatcgtcttggactctggagatggtgtcacccacaccgtaccaatctacgaaggttacgctcttccccacgccatcctccgtttggacttggctggacgtgacttgaccgactacctcatgaaaatcctcaccgagaggggttactcattcaccaccacagctgaaagagcacaacatttcaaccagaaacactagccgaagcaaatccattccacaagcacctggtgggatcatctcatcatcagaaaccaagagagagattccgtgtccgcttgttgtagtagattgtgaggactgaggaccgagaagcagccatggctctagttgttaaaggaaaagtgaatatcaatgagtttatcgacctgacaaaaatggagaagatcttaccgtcgatgtttacccctgtaaagagtgttatgtgttccaaagttgataaaataatggttcatgagaatgagtcattgtcagaggtgaaccttcttaaaggagttaagcttattgatagtggatacgtctgtttagccggtttggtcgtcacgggcgagtggaacttgcctgacaattgcagaggaggtgtgagcgtgtgtctggtggacaaaaggatggaaagagccgacgaggccactctcggatcttactacacagcagctgcaaagaaaagatttcagttcaaggtcgttcccaattatgctataaccacccaggacgcgatgaaaaacgtctggcaagttttagttaatattagaaatgtgaagatgtcagcgggtttctgtccgctttctctggagtttgtgtcggtgtgtattgtttatagaaataatataaaattaggtttgagagagaagattacaaacgtgagagacggagggcccatggaacttacagaagaagtcgttgatgagttcatggaagatgtccctatgtcgatcaggcttgcaaagtttcgatctcgaaccggaaaaaagagtgatgtccgcaaagggaaaaatagtagtaatgatcggtcagtgccgaacaagaactatagaaatgttaaggattttggaggaatgagttttaaaaagaataatttaatcgatgatgattcggaggctactgtcgccgaatcggattcgttttaaagacgcatccatggctgaatggttaaagcgcccaactcataattggcgaattcgtaggttcaattcctactggatgcaaagacgctaactccctcggactgttggataaccgaggataaataatccatgtttagtcctcctagctagggactcttagtcatatagctagcatctgttggtaccgagataaccaacattaaataactcggttttcaggcatgcttcagcgtttgtggtgcctgtcatactaacgctatatattaactaggattagttatatattaatcgccataatggctaggtgaaggaaaacacctccaacgagaagttggtttaaaccgcacgtcgaagctatacgtaaaacttaaacagcgtgcttcataggtccaggaggagacctataaaaaaaaaaaaaaaaaaaaaaa

SEQ ID NO: 490 - DNA, 4139 bp, synthetic construct
  source 1..4139: mol_type = other DNA
gtcattggaaccatctctgtacaacattaactataattttaatggttttcagtacttaccgggctcacatggtgggggttcataccaccatgaattcaaagacttggaatggctcaaagtaggttacattaccgagaaacacaaagaaggcgatgtttggcagcctcgtgaaaataatcagaaatacactactaaagctgactatgtgatcttattaaaattaggttaaatttcgaggttaaaaatagttttaatattgctatagtcttagaggtcttgtatatttatacttaccacacaagatggaccggagcagccctccaatatctagtgtaccctcgtgctcgctcaaacattaagtggtgttgtgcgaaaagaatctcacttcaaatgaacatgaataatactaaattaagcgcaagggccctaccgagtcttattgattattttaatggcatttatggatttgccactggtatcaaagacattatgaatatgatttttaaaacggatacaggtggtaatctaaccttagacgaaatcctaaagaatcagcagttactaaatgagatttctggtaaattggatggggtaaatgggagcttaaatgatcttatcgcacagggaaacttaaatacagaattatctaaggaaatcctaaaaattgcaaatgaacagaatcaagtcttaaatgatgttaataacaaactcgatgcgataaatacgatgcttcatatatatctacctaaaattacatctatgttaagtgatgtaatgaagcaaaattatgcgctaagtctgcaaatagaatacttaagtaagcaattgcaagaaatttctgataaattagatattattaacgtaaatgttcttattaactctacacttactgaaattacacctgcatatcaacggattaaatatgtgaatgaaaaatttgaagaattaacttttgctacagaaaccactttaaaagtaaaaaaggatagctcgcctgctgatattcttgatgagttaactgaattaactgaactagcgaaaagtgttacaaaaaatgacgttgatggttttgaattttaccttaatacattccacgatgtaatggtaggaaataatttactcgggcgttcagctttaaaaactgcttcagaattaattgctaaagaaaatgtgaaaacaagtggcagtgaagtaggaaatgtttataatttcttaattgtattaacagctctacaagcaaaagcttttcttactttaacaacatgccgaaaattattaggcttagcagatattgattatacttctattatgaatgaacatttaaataaggaaaaagaggaatttagagtaaacatccttcctacactttctaatactttttctaatcctaattatgcaaaagttaaaggaagtgatgaagatgcaaagatgattgtggaagctaaaccaggacatgcattggttgggtttgaaatgagcaatgattcaatcacagtattaaaagtatatgaggctaagctaaaacaaaattatcaagttgataaggattccttatcggaggttatttatggtgatatggataaattattgtgtccagatcaatctgaacaaatttattatacaaataatatagtatttccaaatgaatatgtaattactaaaattgattttactaagaaaatgaagactttaagatatgaggtaacagctaattcttatgattcttctacaggagaaattgacttaaataagaagaaagtagaatcaagtgaagcggagtataggacgttaagtgctaaagatgatggagtgtatatgccgttaggtgtcatcagtgaaacatttttgactccgattaatgggtttggcctccaagctgatgaaaattcaagattaattactttaacatgtaaatcatatttaagagaactactgttagcaacagacttaagcaataaagaaactaaattgatcgtcccgccaagtggttttattagtaatattgtagaaaatgggaacttagagggagaaaacttagagccgtggatagcaaataataagaatgcgtatgtagatcatacaggcggagtgaatggtactagagctttatatgttcataaggacggaggattttcacaatctattggagataagttaaaaccgaaaactgagtatgtaatccaatatactgttaaaggaaaaccttctattcatttaaaaaatgaaaatactggatatattcattatgaagatacaaataacaatttagaagattatcaaactattactaaacgttttactacaggaactgatttaaagggagtgtatttaattttaaaaagtcaaaatggagatgaagcctggggagataactttacaattttggaaattagtccttctgaaaagttattaagtccagaattaatcaatgtaaataattggattcgcacgggatcaactcatattagcggttatacactcactctctatcagggaggaggaggaaatctaaaacaaaaccttcaattagacagtttttcaacttatagagtgaatttttctgtgaccggagatgctaatgtaaggattagaaattctagggaagtgttatttgaaaaacgatatatgagcggtgctaaagatgtttctgaaattttcactacaaaattggggaaagataacttttatatagagctttctcaagggaataatttatatggtggtcctcttgtacatttttacgatgtctctattaagtaaagcacaacatttcaaccagaaacactagccgaagcaaatccattccacaagcacctggtgggatcatctcatcatcagaaaccaagagagagattccgtgtccgcttgttgtagtagattgtgaggactgaggaccgagaagcagccatggctctagttgttaaaggaaaagtgaatatcaatgagtttatcgacctgacaaaaatggagaagatcttaccgtcgatgtttacccctgtaaagagtgttatgtgttccaaagttgataaaataatggttcatgagaatgagtcattgtcagaggtgaaccttcttaaaggagttaagcttattgatagtggatacgtctgtttagccggtttggtcgtcacgggcgagtggaacttgcctgacaattgcagaggaggtgtgagcgtgtgtctggtggacaaaaggatggaaagagccgacgaggccactctcggatcttactacacagcagctgcaaagaaaagatttcagttcaaggtcgttcccaattatgctataaccacccaggacgcgatgaaaaacgtctggcaagttttagttaatattagaaatgtgaagatgtcagcgggtttctgtccgctttctctggagtttgtgtcggtgtgtattgtttatagaaataatataaaattaggtttgagagagaagattacaaacgtgagagacggagggcccatggaacttacagaagaagtcgttgatgagttcatggaagatgtccctatgtcgatcaggcttgcaaagtttcgatctcgaaccggaaaaaagagtgatgtccgcaaagggaaaaatagtagtaatgatcggtcagtgccgaacaagaactatagaaatgttaaggattttggaggaatgagttttaaaaagaataatttaatcgatgatgattcggaggctactgtcgccgaatcggattcgttttaaagacgcatccatggctgaatggttaaagcgcccaactcataattggcgaattcgtaggttcaattcctactggatgcaaagacgctaactccctcggactgttggataaccgaggataaataatccatgtttagtcctcctagctagggactcttagtcatatagctagcatctgttggtaccgagataaccaacattaaataactcggttttcaggcatgcttcagcgtttgtggtgcctgtcatactaacgctatatattaactaggattagttatatattaatcgccataatggctaggtgaaggaaaacacctccaacgagaagttggtttaaaccgcacgtcgaagctatacgtaaaacttaaacagcgtgcttcataggtccaggaggagacctataaaaaaaaaaaaaaaaaaaaaaa

SEQ ID NO: 491 - DNA, 1922 bp, synthetic construct
  source 1..1922: mol_type = other DNA
gtcattggaaccatctctgtacaacattaactataattttaatggttttcagtacttaccgggctcacatggtgggggttcataccaccatgaattcaaagacttggaatggctcaaagtaggttacattaccgagaaacacaaagaaggcgatgtttggcagcctcgtgaaaataatcagaaatacactactaactcttgagtactttcgccagctcacgttgacttttttcgctatcactcctttttagtgtcaaaacgtaggggtcttcgaaaatgttgagactttgcacaatctttctcaggctcgccacagttttcgtcacgatgatatttgactctggggtatagtagataatagatagaagtggtagctttactcgaaggcgaagatctgctcgatgtatttttggcgtgcagcaaatggcatccgatcctagagttctactggcttctgtcccaaatacaaatggcttccgaaagataggattgtcttttagaagcgggagcatttgaagataaagaggagtattgaatttcgggagcacaacatttcaaccagaaacactagccgaagcaaatccattccacaagcacctggtgggatcatctcatcatcagaaaccaagagagagattccgtgtccgcttgttgtagtagattgtgaggactgaggaccgagaagcagccatggctctagttgttaaaggaaaagtgaatatcaatgagtttatcgacctgacaaaaatggagaagatcttaccgtcgatgtttacccctgtaaagagtgttatgtgttccaaagttgataaaataatggttcatgagaatgagtcattgtcagaggtgaaccttcttaaaggagttaagcttattgatagtggatacgtctgtttagccggtttggtcgtcacgggcgagtggaacttgcctgacaattgcagaggaggtgtgagcgtgtgtctggtggacaaaaggatggaaagagccgacgaggccactctcggatcttactacacagcagctgcaaagaaaagatttcagttcaaggtcgttcccaattatgctataaccacccaggacgcgatgaaaaacgtctggcaagttttagttaatattagaaatgtgaagatgtcagcgggtttctgtccgctttctctggagtttgtgtcggtgtgtattgtttatagaaataatataaaattaggtttgagagagaagattacaaacgtgagagacggagggcccatggaacttacagaagaagtcgttgatgagttcatggaagatgtccctatgtcgatcaggcttgcaaagtttcgatctcgaaccggaaaaaagagtgatgtccgcaaagggaaaaatagtagtaatgatcggtcagtgccgaacaagaactatagaaatgttaaggattttggaggaatgagttttaaaaagaataatttaatcgatgatgattcggaggctactgtcgccgaatcggattcgttttaaagacgcatccatggctgaatggttaaagcgcccaactcataattggcgaattcgtaggttcaattcctactggatgcaaagacgctaactccctcggactgttggataaccgaggataaataatccatgtttagtcctcctagctagggactcttagtcatatagctagcatctgttggtaccgagataaccaacattaaataactcggttttcaggcatgcttcagcgtttgtggtgcctgtcatactaacgctatatattaactaggattagttatatattaatcgccataatggctaggtgaaggaaaacacctccaacgagaagttggtttaaaccgcacgtcgaagctatacgtaaaacttaaacagcgtgcttcataggtccaggaggagacctataaaaaaaaaaaaaaaaaaaaaaa

SEQ ID NO: 492 - DNA, 2330 bp, synthetic construct
  source 1..2330: mol_type = other DNA
gtcattggaaccatctctgtacaacattaactataattttaatggttttcagtacttaccgggctcacatggtgggggttcataccaccatgaattcaaagacttggaatggctcaaagtaggttacattaccgagaaacacaaagaaggcgatgtttggcagcctcgtgaaaataatcagaaatacactactaaagctgactatgtgatcttattaaaattaggttaaatttcgaggttaaaaatagttttaatattgctatagtcttagaggtcttgtatatttatacttaccacacaagatggaccggagcagccctccaatatctagtgtaccctcgtgctcgctcaaacattaagtggtgttgtgcgaaaagaatctcacttcaaatgatgaatgctaatggatttagcggtgtggagaaagagtatataaggaaacatcatcttcatcagcctaaggagaatcaatgcagttcgtttttagtcaagcacattcgagcacctgttcatcttgtttggtcattggttaggcggtttgatcagccacaaaagtacaagccctttgttagcaggtgcatcgcgcaaggagatcttgagattggtagtcttagggaagttgatgtcaagtctggcctccctgcaacaacgagtaccgagagattggagcttcttgatgatgaagagcacattttgagtttcagaattattggcggggatcacagacttaggaactactcctcaatcatatctctccaccccgaggtgatcgatggaagacctgggaccttagtaattgaatcatttgtggtggacgtgccccaaggaaacaccaaagacgagacgtgttattttgttgaagcattgatcaattgcaacctaaaatcacttgctgatgtctcagagaggcttgctgtgcaggacaggacagaacccattgatcaggtctaaagcacaacatttcaaccagaaacactagccgaagcaaatccattccacaagcacctggtgggatcatctcatcatcagaaaccaagagagagattccgtgtccgcttgttgtagtagattgtgaggactgaggaccgagaagcagccatggctctagttgttaaaggaaaagtgaatatcaatgagtttatcgacctgacaaaaatggagaagatcttaccgtcgatgtttacccctgtaaagagtgttatgtgttccaaagttgataaaataatggttcatgagaatgagtcattgtcagaggtgaaccttcttaaaggagttaagcttattgatagtggatacgtctgtttagccggtttggtcgtcacgggcgagtggaacttgcctgacaattgcagaggaggtgtgagcgtgtgtctggtggacaaaaggatggaaagagccgacgaggccactctcggatcttactacacagcagctgcaaagaaaagatttcagttcaaggtcgttcccaattatgctataaccacccaggacgcgatgaaaaacgtctggcaagttttagttaatattagaaatgtgaagatgtcagcgggtttctgtccgctttctctggagtttgtgtcggtgtgtattgtttatagaaataatataaaattaggtttgagagagaagattacaaacgtgagagacggagggcccatggaacttacagaagaagtcgttgatgagttcatggaagatgtccctatgtcgatcaggcttgcaaagtttcgatctcgaaccggaaaaaagagtgatgtccgcaaagggaaaaatagtagtaatgatcggtcagtgccgaacaagaactatagaaatgttaaggattttggaggaatgagttttaaaaagaataatttaatcgatgatgattcggaggctactgtcgccgaatcggattcgttttaaagacgcatccatggctgaatggttaaagcgcccaactcataattggcgaattcgtaggttcaattcctactggatgcaaagacgctaactccctcggactgttggataaccgaggataaataatccatgtttagtcctcctagctagggactcttagtcatatagctagcatctgttggtaccgagataaccaacattaaataactcggttttcaggcatgcttcagcgtttgtggtgcctgtcatactaacgctatatattaactaggattagttatatattaatcgccataatggctaggtgaaggaaaacacctccaacgagaagttggtttaaaccgcacgtcgaagctatacgtaaaacttaaacagcgtgcttcataggtccaggaggagacctataaaaaaaaaaaaaaaaaaaaaaa

SEQ ID NO: 493 - DNA, 19296 bp, Citrus tristeza virus
  source 1..19296: mol_type = other DNA
aatttcacaaattcaacctgttcgcccagaaaatacgtctggcacaacagggatccggaataggtccagcctttaagctctaatattcccacaacaaaaattacactatgtcgaaactcagaggaagcttctggtcttcggccatcgctgttaacagcgattacacgatatcgcgcatctggcgcaaacttaacaccatagtagtcctgcactactttggttttgttagaatcaccaaggtgattcgtgacaaatcggctgatatgccgatagtccctttacggaaatctgtatttccgttttctgttcgcgcggctgtcacgagcttcgtgctgctgggcgtcctcttgacgctccgcattcagggtgcctctgtggccttcccgttatcaacgcatctggcgttgttcgtccccgctctgttcgcgggtttttcgaggttttctctgtgcaaacctccgctcacctctgccgctaagaggtccctccgtcaggcaaagcgggaatctgtttccctttctagccgggcctcttctcgcttctctagggaagtccctcgcggcacacgttcaagacttcacagacgtgtggtgagacgagctgacactgccccagttgagagtccccaagacaagcctacccgacgaaacagccgacttggtaagacttctcacctcccttacgtgggggaggcagcgttggatgatatccttcgctggatcgaagaggttaatcctcatccctcgatggtcgctattccagtgcccatcacttttggaaccatgcctgcaacggcttggtgttcccactctgaagccgcagttttgcgtgccgccttgactatcacgcggctgaaactgatttctccactcaggagaaacacgtacggtacgtctataatgacgtatcttctgccactaaccgtccccgtacggtttctccccgcaagtgcgtccatttttcccagtaaatctaaactgggcgttgaggtcccctctggtagggaccttcacactgcgttcgtgagatcttctcacgcgagcgctttcttctctgacgcggttcgcgcttcgtttgttccgtccagcgcggaacaattttttcacttccgtcgtcagcggacgcatgttcttgctattacagacccggtcctgtgtggtacggtgtctgttttaatgtcggacggtgttaacacagcacgtctcgacgttgttgctccggcgtactatgcgtacgctgaatctttgggcgccagagtgcgctttttgtgggagtcgtccgacgtggacgacgctaaagttcgtgacggtcaatgttatgtccgtcatgtgttcgacgtggctctctactttgggagacgcgccgacctttccgtgcgtagagcgctgggtatgtaccccacagtgggtgcactaaaggcttatcttgttcgcgaatacggtcgcgactctcttaaggttcctatgcgtgggacctacacttttggcagtgtgtttcactgcttgtcgctaaatcttcaagtcgacctgcgatctattcctaaccatcatttagttggtgggacgtctgcccacgtcttaattgggcaggttcgagtcagtgttcctggctcgattgttaaaccttcacgttcggccgttcgtaggcgtaatagacgcatgcgacgtgatggttttctcggtagttccggttcttcttcttctgcgggggagtcgactcgctgttcggactgctcttctcctcgcggtttaccttctccttccgttttaaaaccttccctaggtcggatcccgagtatagatcggcggttccggtttcctgcgggtacgcagttgcgcgtctccgtacctaggcgggtcgatgaccatgtttacgtgtcgactggtagcaacttcgatgagttgtgccatgcagttttgacacgtatgtcaaaaggtacaactctagaaatccttttacactcgattcgagagcggaagggactacttggttttgcggcgtgcttccgttgggggtcttcacacgtgtttgtaaagcgtggcaactttactgcccgatttcctatttcggcggtcaggtatgagaatcagtatgccgcggttatgatggatgtggggactagttgggttccgaagggctacgttcccgatgttgatgttgtgaaacgtcggagaagtcgtaatcgtcgttttcctctttcccatcgtgcggtggatcagtcggtccccgcgttacagtcgagtcctgtcgaggttgcttcggtttcgagtgataagccttcatcgtcgcagaaggcttcttcaccttctacttcttcttcttcttcttttaactcgacaaggagttcagactgggtgaatgtcggtttctctcatcgaactactaataaggttcgtgaaccgcgttatgctggtcatcgtaggatcggaaattttactttcccgaggggcacagtgtacaacacgcctgtcgatgagcgcgcctataaacgtgttcttagattgcgagataccacagcctgttcctttctccgtatactgctagctcgtttgtcgggttacagacctttaagtgacgagttctttaacaagtgtgtcacttcccggtttgtcgcgtgcattgaacctgtggaatcaggtctcgttaaggtgcatttccgttctgatgttttccgtgcctctttcccgtttgacggtcaacctatacaccccgccacggctttgacattggaagtggtggtctcttgggattggatggttacggcttttcagaatcccttgaaggatggatattgctacattcgccatttcgccgaagttagtttgagcatggggcgaattttcttcaggagggacgtcgacttgggacctttcccatacgttttcgaagtgcaacaccgtcttgaaaggttgtacgggaaagctgcgttaagatacggtgttaggggtcaatattcagccccgcgctgttttcactgttgctacaacgattcaccgagaccgatggcgtcctttaatgggtaccataagatgggtggtgaagataactccctgataatcacagacaccgacaggttgcgtgctgtggggagtgcctatgaaaaagtgaagagaaacataccagattcgttattggttcggtctgtagaaaaggaccttatagagtttaatcagactctagtcgacatgcatcgatccagaccgggcgttgtcgtacctttccaaatgagtgagaatcagcaagtgatgcttactagggcgtacccggaatttaatattaattttattcattccgtacattccgatcatccggtggcagcaggttctagggcgttggagaatcatctcgttcgtaaacacgctggtaccgattattcggatgtggggggttgtccgctgtttcatttacgtgcgggtcactccggcgttcacgtttgtagaccggtgtacgatgttaaagacgctcatcgtagagtagtccgtcatcaccaacttagtaaggtttcgctagatcagagtgacggtgttaaacaagttggctggaccgtaaacacgaattctgtatgcggtaacattttgggagagtgttatcatgcatcggaggcgatggttatggttcaagtttatgacgtaccgctacgtgagttgtgtagggctatgataaacaagaaaacttccgtgtgttatatgaccatggttacacctggtgagttgttggacgcccgcgagtccttttttattaaggacttggattgttcggttgagttagatcccattgcagacagggttgtttactgtttcaacaattctgcgtatacacacacgtactccactatatgtgagtgtatgcgaactccttgcttggtagtggacgggtttttgtttactatcgaaatggtatcgctcaggtgtagcgttaattactattgtatcaccaagtcgtcggtctgtccgagaattagtgagactaagcggttgcgctaccgtcggtgtgatagcgacttgattagaatcaaaattccccggtactccagtaagactcgtagttgtttacctgggtgttactatttgtacttggacgccaagtttgtaagtcgcgtgtacgagtacgtggtcaataactgcgttgtggtgaacgcgaaaacttttgagtggacttggaattacatcaaatcttgcaagtcgagagtggtgatcagcgggaagattatacaccgagacgaaccaatcgctttagagtacttagatgggttttctgcggttatgctgtccgctggcgtgaagggtaggcaaaacgcggacgtttctagacgcttagccgctttttcgggtgaaacttcgattttcgagttagtggggtttgctatatccgagaagtgccgcgacttgttcttgggtattcaggacgctgtggaaagatgcgtgaagtcgtacctcaggaattcgtttaatatgagtttcgtggacttgtccgaccccttacttacgattagcgaatattcagaattggacgttcctatcgacttaccgggtttcggtggaatagtggacggtaacgaaactagacttatggaagacggtgttaaatcggctttattacgtaaagcggttcaagccgaggctcagttgagtcttaagagaggcaatacttccgaaatcgttccgtgtgatgacgatgacgactcgaacggtgatgattcgcgtgtttcgctcgatacggactggtggttcgtccttcggggtggtagttctggcgggttgcgagctggagccgccccttctttgtttaggtgtttactcaggaaattgggtgggggtttatgtttggcaaagaaagtgttggaactgttagtcaagcgggtggttgaatcgttttctcgtttgaagcggaaaaccgctcgtttaacgtccttcgctaatttgttgcttgcgaggctctcttgcgggtttttcgatgacactgttttttctgcggtctgggaaatagcgatcaacctgaccaggatcgtcgatggagtagtcaagacaaaactggggtgctttcgtaatttatttcgattgattcccaagttatacgctggttgtaaggacgttgtgaaggacgttagtaacgcttacaggtcggttgtctcgttttccgctgaggttttgggtaagagttactctaaactttgtcagttttgcttggaaatatttgacatcgggcttattgaggtttctgctcgtaatttgggactggaaacatgcgtttcaatagcactagctatttttgatgtgttgattacttttcctttggggagcgttagttttcccgtcgtttgcgctagggttttcggtcgtctcgctatggaagtgggatcgaactttttgtttaagaaagttttcggtaaacccgaaactcttggtgaagatactttccgtaggactgtgagtatggttttgaggcccaaagcgtttgacaagctttccgtggatgcgaaaggtttagttaggtgctctggtgttattcctggagtgttaaggataatactatcttccttgttttccgaagatgacgcttgggtgggttatagtaaacatgaagtttcttcccttcctattgttaccttttgtgtgaagagattgtcttattctctggagcggtgtaaggaagcgtgtgtcgcatttattgttgactctgctaagaagattttgaaatctttaacttcagagttcaacgaatccattcaaaactccgacttgaccagtggtgctaagtccttgtacgggcacgtgagctcgatactttacacctctagtggtgtgattaataaagcaggaagcgccgtcgctactgttaaagcggtcgggagtgatatcagtggtcgtgtgaaacgtatgcgaccccgattttctctgtcccgtcactttgacgagcagactagtgagtactactctgctagcgattgttccgaactagatgagtcgttgtttagtgaaacgcctggtcttcgtggaaacgccaggtgtagagatttgtttcgtatcgtgtctagacgcgcggtagcgtgttgtgagtacgtgacaattcttttgaaacggctagcgtcgcgtgccggtgaatactcctactcgtatgtgatggatacgctcgtgagattgtatgtggcgaccgatgatgttgttagacggtgcaggtcctttacgttcgactgtactgataaagcatctaatttcgtcaccgggtttcttagttggcgcagcttacgttctggtgcgtactctgcaactccagggttgggtggtggtagtagaggtttaacgtcgttttctcacaccggtggattcacgcgcgttatcggcgctcttgggaacaccttatcggtggtgtttgatgaggaattcttcagaactttgctgcatcggttgagggcagatgttgtggttttactggtggagttcttgaaaaaccttcccgtttgtttgttttcaatatacacttttattgaatgtcggggtaggatctttcctttaagagagttcctatggggtttttgtcgtttcgtttgggatgttatcgaggggttgtccatcaatacttatcaatacctctctgctgtcgctgagaaagtgtatcgaggtgcctttaatcgtcgatttaacgaagaggatgagaggacgcttcgagtgatcacggaagcagagggaagaatcgaatttttgcgagttgttctcgcggaaatggaaaggttccgtgctgcgtcgaacgaggtttcttcgtcgaggtcgtctgatagtccttcattcccacctacttacggtgaaattgaggagttaaatgatgattcctccgatagtgcgctagtgataggcgtcgacaacggtaccggccgcactatcgttgacggtgagaccgattctgcgtccggtagcgatagtgacgtttctatcccgttggatcgcgattttgaacaaatcgggcgtcttggcggaaacggtaacgtcgatgtcgttcggctgggtttgaaattcgttctgaagttgttacgcaacctattcgatgctagaagttttaaagtgttgtatgggttgttacttcaaacccttttttatggtggttcggtaaataaatttgtgtgtcgtctggtctttagtcttgggacttgcttacctttcgagttactccgatttgcgtgttcagcgaggcggttgttgaagagtttggcatcatttgtttaccagactaaccttttcagcgaagttatggtggagcatttgtttagcgtttcccgactgctttatgattcccggtacttcgcgactgtgttttcggaattggagagacttaacttctatttagactatttcctttcgctcccgaagagatatctattccctaattctagggctcgtagttgtgctagggttccggttcccgtgattaggaccgaaggagtggcaccagtccgtgagagatcactaaatgacatactggactctttagactctttaaaggtgtcggacctcaaagggaagtcgacgttcgttgatgatggggagtcggattccggtagtgaacattcgggtagttcgatttcgttcggttccgtcaacgaagaagttttaaatgcggtaaatggtgacagcgtttgcgaaaaagccccgttgatgaagcatgttaccgcacttagcaggttggaacgccaccctagtggtcgtaaagacattcctgtttctaggaaaacttttgtgcgtggtgaatcttcgggtgtgaaatcgaaggtgagtatgtgcgattacttggtgaccttgaattcttcgtttggcacagtgcctgacatgtaccctgttgcgcgtgacataacgtataagaaactgactaacgccatgcgcgaattctattactcgcaaaaaataaccttgtacgaacttcacgggaagttgagttcctattgggacgagttgaaggtcgcaggtttcgatagaaagttaacgagaatggatttggacgatgatgtctatgttgttgactttaatcggaaattgttggtggggagaaacggatctcatccgtttcgtaatacgttaaagtcctattgttttatgttttgtaacgatgggttggttccttgcccgcgttctcagaaatatgattatgctttgatttctaatcaaacgtcttttgttgccgcgaattcgttcttacgtgccgtggatggtaaggatttgacttttaccaatgaggaacatagccttatcgtttatgaagctcctcccggtggtggtaagactcattctttggtgaattcgtacgcggattattgcgttaaagtatcttgtttagtagtgaccgctaacaagaattctcaaaccgagatatctcagcgcatatctaatgaattgatgggcaggaagctagctgctaagtatgttaccgatgcagcttccagagtgttcactgtagattcttacttaatgaatcacttgcgacttacgactcaactgctgtttatcgacgagtgcttcatggttcatgctggggcaattggagccgtggttgagttcacgtcttgtaaagcggtggttttctttggtgatagtaagcaaatccattacattcaccgaaacgatctcggggtttcctttgttgcagatattgatgcgtttattcaaccggaacatcgtatttacggcgaagtgtcctataggtgtccttgggacatttgcgagtggctttccgagttttacccgcgacacgtagctactgctaatgtagggagtattgggaagtcgagtgtgtcaatagaggaaatcaatgggtgcgatgacgtaccttacgacaaggcggcgaagtacattgtgtacactcaggctgaaaagaacgatttgcaaaaacacctcggtcgcttaaccgtgggtcggaacaaggtagtaccaattgtaaataccgttcatgaggtacaaggagagacctataaaagggtacgtctggtgaggtttaagtatcaggaggataccccgttctcttcaaagaatcatattgtggttgctttgactagacatgttgattctttggtttattccgtacttactagtaggaggtacgacgatactgcgactaacatagatagggcgaaggaaatttttgacaaatttcgttcgtcgaatcactcgtacggttcgtcatcgttagagtggtaccttgaaaagtatcctaccgaatataagggtagtaaagcatcctctgctccgataagttgcattaacgaatttcttaatgaggtcgtcgttggttcttctgtcgtgcagttgggtgatgtgtctgaagaactaagttcacgtccctttgaatcgggttgtgataatgttactgtaagagacaccgcccctcctgactcgggtaacttacacgaaccggctcgcgttcggcgtagtaaggtcacaagcaattcctccaagaaaagcgtcactgcaagaaaaccttctgtcgtacgaaagtcgtaattataactttatcaagacggaacggtttgttggaccaagcgaatttggtagggcgatggctgctgctgttatcgaacgttgtttcaaaatggaagagatggctaagataaggtgtgatattatatcccttactgaagctaacattttaaaatggctcgataagcgcactccctgtcaaataaaggccgtacacggggagttgaaacttcccttttcggtggaggagcaaatttccaacttcaaactgatggttaaacgtgatgctaaggtaaaacttgacgattcaagtctatctaaacatcccgctgctcagaacatcatgtttcataagaagtttatcaatgccatattttccccgtgtttcgacgagttcaaaaatagagtgttgtcctcgcttaatgacaatatcgtgttctttactgagatgacgaacgctgggttagcggaaattatcagaagaatcattggtgacgacgacaacttatttgttggggaagtggatttcagtaagttcgataagtctcaggatttgttcattaaagagtacgaacgtacgttgtattccgagtttgggttcgataccgaacttctcgatgtgtggatggaaggtgagtatcgcgctagagccaccacgctggacggtcagctgagtttttcagttgatggtcagcgtcgttctggaggttcaaacacttggattgggaattccttggttactctaggtatcctttcgttatattacgacgtttcgaagtttgacttactcctcgtttctggagacgattctttaatttattcgagtgaaaagataagcaacttttcttccgaaatttgcttagaaacaggttttgagactaagtttatgtctccgagcgtgccatatttttgctcaaagtttgtggttcagaccggtaacaaaacgtgttttgtgcctgacccttataaattattagtaaagttgggggctccacaaaataagttaaccgatgtcgagttatttgagttgttcacttcttttaaggacatgacgcaggactttggtgatcaagtggttttggagaagctgaagttgctagtcgaagctaagtacggtttcgctagtgggaccactatgccagcattgtgcgctattcattgtgtgcgatcgaactttctgtcctttgagaggttatttcctttcattaggggttggtatgttgttgacgctctaaaactcagacagcttaggaaactcactaatttgatctgtgaacgtgtagtttacgacaatcgggtgagttatttttcgtacttcgataacccgttcactaaacctgacgctaacgacgataacgtggacgacctcggacaagcgggtgaattagcaaccggctgatcgattgattagttctcgctgagagctaatgtgggtagttgagtcaggatgtttgccttcgcgagcgaaagccaagacttgttagaagaaaaagtttttcgtcgtagaacttaccatcgtaaatattttggtgacgtggttaaggacttcactatcgatattggttatgatactaccgatcgcgatcctactgtattggccgattatttctcattgtatttctttttacttaacaacgatagtgttgggcctatagcagcctcaattgtggtaagcccaccggttagcgggactcataaaattcgagcgcatatcgataatcaaccgaactgtgaaggtaacgtgacttacgttaaaaccttcgacaaaagtcgctttgtgattcgcgttaaagcgtccccgtctatgagaggttactactcttttcgggtgtttcttagtagcgatgtcgctagcgaacgcagcgagttcgtgtgcagttttgttggtagcaggtttctttgctgttgtacacaaacgatatctgaaaatttgagtaaagtttgttcatcttccttcttcttcagagcagtttcagaaaccgcgaccaacgaattttctgttgcgactgatgatgtggaagacgttaagtacataagaaaacaagccgagggtttttcacgttgcgctgacccataccctcctaggtgttatcgtagcactaatttgggcgattcttcaggggttcagagtcgtacgattgaagaggaaggttatatgacgggcactgcaggtaacgtcgcagtcaccgtcccgaatactccactagttagtgctgtctctccgtatatcgcagggtacaacgagaatgcacgctcgcgcgtctcattaatacgccgggtctgttgttacgccgtttgcgttttagtggtgtccgttcttataatgagcggtttattagccattatatttatatgatttagtgtagtaactcataaggtacaattacttacttaagactcgccgtttgactctgtttaaacggggtttaatggactgcgtaattcaagggtttttaactttcctagttggtatagctgtgttttgtgcctttgccggactgattatcattgttataacaatttatcggtgcacgattaagcccgtcagaagtgcttccccttacggcactcacgcgactgtctaagcggtatggtgcttttgggtttagacttcggtaccacgttttcaacggtggctatggctacaccttcagagttagttatactcaaacaatccaattcatcgtacatacctacgtgtttactcctgcatgcggaacctaacagcgtatcttatggttacgatgcggaatatttagcggcttctggggagtctggttcgttttacaaagatttgaagcggtgggttggttgcactgcgaagaactaccaaacctacttacacaaactatcaccttcctataaggtgatagtgaaagagtttggaactaagagcgtgccggtgccatatttgtcacctctgaataacgatttaggactcagcgtcgctttaccttcactgattgcttcgtatgccaaatccattctgtcggatgcggaacgagtgttcaatgtaagctgcactggagttatatgttcggtacctgctggttataacacgttacaacgagcttttacacagcagagcatatcgatgtcgggttactcttgtgtgtacattattaacgaaccttcagcagccgcgtactccactttacctaagttgaattcggcagataagtatttagccgtttacgacttcggcggtgggacttttgatgtctctatagttagcgttagattacccactttcgccgttagaagttcgagcggtgacatgaatttaggcggtagagatatcgacaaaaagttatccgataaaatatacgaaatggctgattttgtgccgcaaaaagaattgaacgtttctagtttaaaggaagctttatctcttcaaaccgatccggtcaaatatactgtgaatcattacggaatgagtgagaccgtatcaattgatcaaacggtgttgagggagatagcctcggtgttcataaatcgaacgatagatatacttacgcaagttaaggttaagtctagtatgcccgaatcgcaaagtttgaagttagtggtagtcggtggaagctcgtacctaccagggttgttggacgctttggcaaccgtgccttttgtgtctgggatagtgccggtggaagacgcaagaaccgctgtcgccacagggtgcgctttgtatagcgagtgcttagatggtaggtctaaggccctactaatagattgtattacgcatcatttgtcggtcacgacgtttagcgcggattcggtcgttgttgcagcggccggtagtccaattccttttgaaggtgaacaaaaactcacgttacgcaaatgcgttagtacgtctaactatcaagcaagaatgttcgaaggggattacgaaaaagttttccgaaatgaacgtatatacgcagcttcgatatcattgtttacattaggagttaattggagtgtgcctaacgacgttgagatgactctcgtgaccaaagtggactcgatgggtaaagtggaattttaccttaaaggtccatctggtgaactggttaacgtgcaaggtacttcgcattacgattatgctggtatgcctcaccccactagaaagctggtgaggcttagcgattacaatgtaaactccgccgctttagttttagctttgacattaactcgcgaaaaacgagaaaagttccttttgcgaacattatttgacactttactagcggatttacgaaagacagcaagtttaggcgagtactcaaagaagtacccgatcactcgaaacgatatcgatgtcgtctcatcacgtatggggatcgttgtttcgaaagttttacggggaagcgatttggaaagaatacctctctgaatcaactcgaaatttcgatgaaagaaatgtatcgttagaccacactttgagttcgggtgtggtcgtccgtaggcagagtcttttgaatgcgcctcaaggtactttcgagaacgagttagcgctattgtacaattcggtggtgattaacgattttgttgagttgactggtatgcccttgaaatctttgatgacaggtatcgaagaccgtaaggtacctgacgaattaatatccgttgacccgcacgaagtcggatgtagattcacgttaaacgacgtggaatcgtatctaatgagcaggggtgaagatttcgctgatctagcggcggtcgagcattcgtggtgtttgagcaactcttgtggtagactattaagttcgactgagatagatgcttacaaaaccttggtgtttactaagaattttgatagtaatgtatccggagtgactactaagttagagacttatctatcgtactgcatatcattgtacaagaaacattgcatgaaagacgatgattattttaatcttatcttacctatgtttaattgtttaatgaaagtgctggcgtcgcttggtttgttttatgagaaacatgccgacaatccgctactgaccggaatgctcatagagttttgcctagaaaataaggtgtattactctacttttaaagtgaatttagacaacgtcagattgtttaagtctaaagtgttgcctgtggtgttaacggtttgggatatatccgagcctgatgacccaatggatgaaagggtgctgattcctttcgatcctacggatttcgtgctcgatttacctaaattgaatatacacgatacaatggtggtggtgggtaatcaaatcagacagttagaatacgtagtcgaaagcgatgctttagacgatctatctcaacacgttgatttacgtttagcagcggacaatcccgatctacgcgttggtctgcgttgggcagggatgtttgtgtactacggtgtttatcggtgtgttgttgatagagcggtggaacgaccgacgttgtttagattgccgcagaaactactgagtcaggatgatggcgaatcgtgctcattacacatgggttccgtcgaagctttattcaatctggtgcagaaagtgaacaaggacataaacgttagacgtcagttcatgggacgtcatagtgaagtggctttgcgactgtatcgcaacttaggtttgaggtttccaccgatctcatcggttaggttaccggctcatcacggttatttatacgtcgatttttacaaaagagtacctgacggtgctgttaccgccgacgaactcgaaagtttacgtcaattacgctcatccgtggacgttatgtgtaaggacagggtgtcaatcacacctccaccattcaatcgacttagaagaggttcttctagaacatttagaggtcgaggcgcacgcggtgcgagctcgcgtcatatgagcagagacgtggcgacttccgggtttaatttaccttatcatggcaggttatacagtacttcctaaaaccgatgataaagaaatggatcctgtgagtgctgccgtgcccggtaagtatccggatgtcattgaaaagttcgtggccaataggtccgtagatgcgttaatagaaggcgttataagtaaattggataccaattcaatatacgaagattccactgaaaagtttactggtgaacacttgaaatacgttatggttactatggacactttcttattagaaaactacaaaacgaaaacggaagatctgttggttcacttaactatgatccaaaagaggttatacactatatccacgagcactaaaaccaagtttcgcgataaaggttgtattagttacgtacaagggggtttacgatataagttgttggacaaagtagtttttcctttcattatatcgaaatttaccgacagggagactccaaacgctctacgtaagtttgcttgcactttcgaggagttacacttgtgtatggctaggttaagacccgacttatacgaaaataaaaggacgaccagggctgggactccacatttaaagggctacctatcagctgactttctctcaggttctctccctgggtactccgaacatgaacgaggtatcattcttcgagcgtccgagtctatgttagctagacgtcaaggttacgaggaggcgaccgagcttcttaacctacgcgatttgggtaagtacttatagttggtttggggacggtaacattatactatcccatgagcgctgccttaagggtcgttaattgacgacttttgatatatttactaggtttgaattatggacgacgaaacaaagaaattgaagaacaaaaacaaggaaacaaaagaaggcgacgatgttgttgctgccgagtcttctttcagttccgtaaacttacacatcgatccgactttgataacgatgaacgatgtgcgtcagttgagtacccaacagaacgctgctttgaacagagacttattccttactttgaaagggaagcatcctaacttacctgataaagataaggactttcgcatagctatgatgttgtatcgtttagcagttaagagttcatcattacaaagcgatgacgacgccacgggtataacgtacactcgggagggtgttgaagtggatttgtctgacaaactttggactgacgtcgtgtttaactctaagggtattggtaaccgtactaacgcccttcgagtttggggtagaactaacgatgccctttacttagctttttgcagacagaatcgcaatttgagttatggcggacgtccgctagacgcagggattccggccgggtatcattacttgtgtgcggatttcttgactggggctggtttgactgatttagaatgtgctgtgtacatacaagctaaagaacaattattgaagaagcgaggggctgatgatgtcgtagttactaatgtcaggcagcttgggaaattcaacacacgttgatctgttgcgttccgattcccggtttctatcgggatggtggagtttcatcgtgaacgtgggtgatataatcgtccggttcgcgttacacgttcctaatgaagatatgctgaatagtttttcagctatatcgaattgtacgattatagcggacggtagtgctttactaaaagataatactgtggtcgatcgtttagaaggcatgaatcctttggcttatttattaaaattagcgaaaacgactactactatttgttttactatgtctaataaggttctttttggtactactaaatccgaaccacttagttgtttagctatcacgtcggatcgagttttattcaaagttgttatgggtactaacgttgacgattctcgatgcggctgcagtatttggttttacaacaacggtacgtttcaaaatggattgatccgttgtaataatctcgtcactttgtttagcgtgacttagacacgaagtgactgttcggattcaattgctgcaatgagcattcggcgctcgtggttaaaggttatggctgtagttacggtattatggtacggtaaagagccttccattagtgaaggttacaatgctctcatgaatgatgactttaagtttatcgatacgcattttacaaacgtttcttacgctaagaaatgttacgatttggctaatttcgatttagactttctacgcatcgttatcattcctttgagtgggggtacggtgaatgaatcgcgtgctgatcgcactaacgtttcagaaattgtcgaatcgcatgtgagcgaccgagacaggatgagcatcttgttgcgtaataagcggatccaaattccttcgctcttaccttgcgataactagagtctactcagtagtacgtctattagtataacgtattaagcactttagtaaagggttttgtttaaatcaaacaatatgcgagcttactttagtgttaatgattacataagccttttggctaaggtcagcgctgttgtggaacgtttatgcgatcccagcgtaactcttgcggaagtgatggacgaaattaatgactttaactcgtttctcgctttagtgcactctatgaagtcagacatgaacggagaccatcaggatggccaccacgagatgggtgaacacaagtctcggttgttatgcaacatagaggcgaaattgcgagtacttctcgacatcataagacgtcggttcactcgcgacaagctgctctgtactagcgcgacagatgtcatgggcttctttgtaatgaggtacatgagttctagccacaccagcttcgaatccgtaatgaggacggagttgaggttggtggttaaggcggtactgtcggatttatcccgcgcgcataaactggattttagcgagcgagcttttgcggcttatggtatccttttgcaaaagggtactgtgtcgaccgtttgcggtcagtttgacattaatttagtctctccatcttgcgtgtaggttaatacgcttctcagaacgtgtggttgtattaactaactttaattcgaacaaatatattgtgaaagtctgcgagttacaatggataatactagcggacaaactttcgtttctgtgaacctttctgacgaaagcaacacagcgaccactgacgtcgaacccgtgagttcggaagcggatcgcttggattttttacagaaaatgaatcccattattatcgatgctttgatacggaagaatagttatcagggcgctcgctttcgcgcgagaataataggagtgtgcgtggattgcggtagaaaacacgataaggggttgaagactgaacgtaagtgtaaggtcaacaatacgcagtctcagaacgaggtggcgcatatgttaatgcacgaccccgttaagtatttaaacaaaagaaaagctagagccttttctaatgcggagatatttgcgattgatttggttatgtacaccaaggaaaggcaattggctattgatttggccgctgaaagggagaaaacgagactggctcgtagacacccgatgcgttctccggaagaaactccggaatattataaattcggtaggactgctaaagcaatgttaccggacatcaacgccgtagacgttggtgataacgaggaaacttcgtcggagtatccagtgagtctgagtgtttctggcggagttctccgcgaacaccacttcatctgattgaagtggacggaataagttcctcgcggaactttgtgttgggttggtaaagacccttatgatggtgatatatcactagacaataaccggatgggtaaagtctttaaaatgatcgaggggaaaattaaccgtatcctctcgttggtctaagctcccacagagtggtagtggtctcaagtgaggcttaacgtatgcgtgaaccaaagaagttctccttagagtgtgtgttgtttacccaacgcactgtccctatggggggccaacataggtcca

SEQ ID NO: 494 - DNA, 3439 bp, Spinach latent virus
  source 1..3439: mol_type = other DNA
gtggtattgtgcattattattttaacgcacaacccggattaatcaggttttctgagtatatacccgttagtactcaatggatacaattgttcaaatgaaagtattgtgttacgagtcgatgatattattaatgataccttcagacgtaaacgcaccaaggccggaaactgccattggtaggttgatttccgatgccgctgtttcaggtgttttgcgacaatgcgatttcactgcagcggaagcctctcaatgttttgttccaattatcaccggaagatcagaatgcattgagacgcgattttctggaagagaaatacagtttcgcaatttttcgtattcctcacaatcattcgctgctgcgcatcgagtgtgtgaagcggattatatttatagtcgattccagacgagaaataccacgatcattgatattggaggaaatttttgcacccatagtaaaatgggtagagataatgttcattcatgttgcccgatattggacgttcgtgatggagctcggtatactgacaggttcatgtctgtggcgggggctttggaaacccagcctgaccgtgagctcagactgaactattgttccaataaatttgaagattgtgatgtttccgcaccatgggcgatggcgattcactcgatttcagatataccgatcacaagtgttgttaagcattgtttccgcagaggggtcaagaaattgatagcctctgtgatgatggatcccatgatgcttgttgcttctcaaggttttatgcccagattgaatgttcaatgggaaattgaacctgatgaggagaacaaaggttcccggcgaatttcttttcatttcgtcgatgctcctggattgtcatatactcataactatgacgtgcttatgcagtacatgacttgtaatcaagtcataatcagtgggaaagccgcgtatcgagttgagcgcgttgcagatctgtctggtgtttttattgttgagattaaccctggcggcaactgctggaatgaaagactggatctagttcccatgcgagatgtttcatgcgcgtggatgacttcgttaaaacgtaagaccttagtgcgggttgccatcccgcaatatattcattcatgggaagttaagtatgtgattgccgacactgattttgttagaagagttgctgaagtgtcgttccgtcagtataaaccagaaacaccattacaggatttggtgaaatctgttgcgacgatgatttcctctgcttctaaccattgcattatcaatggtgtcaccatgcaaactggtacaccgttggccattgaggactatgtcccaatggcggtgacttttgttgccttcgctaaatcaagatatgattcgataaaggaaggcatgaaaatggttaggcagagaggtactaatatcgcggatcctaatgatcattatgattatgagaaagatggatcggatgttaagagtttttcaaatcacataattcccatgaagaataccatcaagtctctgtttttccccatgaaagtgaagatgaatgataattctatgctcatttatagtcaaggaatcttgtcaactgttgttgatgagataaaaacactttttggatgggatgtttgggacactgacgatgcggtaatacagtctctgccctctttttataagatggaggatgtttttcaagttacgtctgaccactattgtttatcacatacattatctgtggattggtggttggagggactgtatgattcttaccatgacatgcgtgttgcgcataaaaagaaacttgatgaagaagaatctcggaagaccaaggtcgagaatgccttattgaaaattgctgaggttttggagaaacctgatgttagcgatggtcttaaagctctttcagaattgcccataatatcatcattattggagaagaagagcgaagaaatcgttacaaaacctcaatgcagggatactgaaaaaccccatattaatccctatgctgatgcaatcaaagaggcgcaggcctattacgaagagcttgaggtcgtaaatactcgcaatttgagaggtgttggtgattacctcttttggcgaaagaagtcgaactatgccagcgtttggggcgctgatgaatcgagagtggttcttgaacctatggcaaggaagttttactctcgagatagaaatgtttccatacccgagtatgagcgaggtatgacggttgatggtttcgtctccattaaatgggtggacggaaacattactgaggacacgtggaagtgtctttccaaatacgcagttgttttgctcgactcttcttgcgtgtttgatgccggttcacgtattatgccaggtctgaaaaaggcattggtaatggatgcaaatttcaaaatcgtgatcgaggatggtgtggcaggatgtgggaaaacaacatctctcctcaagcaagctaagccggattcggatttgttgttagctgccaaccgtgagactgcaaatgacgcaaaagccagcggcgttattcctaaagcgcttgaataccgagtgagaactgtggattcttacttgatgttgagaacgtggttcacagccgagagattgctcgttgatgaatgtttcttggtccatgctggcttggtctatgcagctgccaccttggcacgagtgaaggaagtaatagcttttggtgatacaaagcagattccattcgtgtctcgtataccaactgtcaaactcagacacgcgtctgttgttgggacgttgaagccaagaacaattacctacagatgccctagggacgtgacggcagtccttagtgagaaattttatggtactaaggttaagacgtttaatcttgttaaacagtctttggaattgaaaaacatagattctagtaccgaaatacctgtagaaaaggatacgctatatatagcgcatacccaagctgataaacatgctttgatgcgtttacctgggatgaatggtatagaagtgttaactactcatgaagcccaagggaaaacaagagaccatgtgatacttgtgcgtttaagtaaaactaccaatttattatattccgggaaaatgcccgatgctggtggttcgcacaatcttgttggtctgtcccggcataagaaatctttgagatattttagtgtctttgccgatgatccagacgatcaaattgcgactggaattcgctggtccaaaacattggatgagcaagagttagcagcttatagagctgctggttagtgttttatttataaaacctggttaagggtcctccgggatgtgctcagcacctagcctaagccaagtccatatgcccacctatgctgctccgggtggatgcttatacatgctatggatgcctacatttgaaataatgtagatgcctaatactctctctcagggagagagtttagatgcctccaaaggagatgc

SEQ ID NO: 495 - DNA, 2939 bp, Spinach latent virus
  source 1..2939: mol_type = other DNA
gtattgtgcagtattattttacgcacgacccggattaatcatttttgtgagaatatacccgatagctctcaatggattcttaccacttcttatctcagttgtgtgacttgaatgttctgactcatgcgctttatgttaatcaagtgtttgagattgtggatcagtccacaactagttatatgcagatgtggctttattcccgtgttattgtcccagttttgaaatatcatctcagtggagatattatattggataaattgcacgatgtgttccttggaacctttcgttcaatgatggtgccgatgattatgttgaaccgactttcattcgtcgtgaagatgacgacgatgaaccaccaccggaaagcgtatttgccgcttgaagaaagggaaaaaattcatgctgcgacgtttcttggtcatgatcattgggcaagcgttacttcgggatcatctttttatgatgatctcgaaattctcgctgatgagaccgtgaacgatgatttgcattttgataaagaatcttccatgccagatgagtatcagatcatgtggaatgatggtacaattgattccgtttggtctagtcagtttgaatgcgaagaaccaccgaaaccgaaatttataccacgcccttctgataaggtgtgtgatccagtggttattcaagatgccgtgaacgatatattcccatttcatcatgagatggatgatcgatatttccagacgttagtggagacacaggatatttcccttgaggtttcgaagtgttggatagatgcctccaatttcagagattttgttaagggtccaaattcttatgttgagcctgtgtttcaaaccggtgccactagtaagagagtgcatactcaacgtgaggctcttttagctgtgaagaaaaggaatatgaatataccggaattgcaatccactttcgatcttgatgcggaagtcaacacgtgtttcaaacggtttctcacacacgttgttgatttgccacgattaaaaaggttgcaacctatgactggtgttgaggtggaatacttcaatcaatacttgcttgggaagaatccacctgtgaaggaatatcaaggtcccttgacattgactgcacttgataaatatatgcatatggtcaagacgattgtgaaaccagtcgaggacaattcgttgaagcatgagcgacctttgtgtgccactattacctatcataagaagggtatagtgatgcaggcctcacctcggtttttgagtgctatgtcaagattggtttatgtcttgaaatcaaaaatccatattcccagtggtaagtggcatcaacttttcacgctggatgctggaaaatccgatgccgtaaaatggtttaaagaggtggatttttcaaagtttgacaagtctcagggcgagttacatcacaaagtgcaggagaagatatttaatgctttaaagttacctcccggatttgttgagatgtggttttccgcccatgagcgatcacacattgtggacagagaagcagggattggattttccgttgattatcaacggagaacaggagatgccaatacgtatttgggtaacactttggttactttgatttgtttggctagagtgtatgatttatgcaatcccaatattacctttgtcatcgcttcgggtgatgattctttaattggaagcgtcgaagaattaccgcgcggaccaggagaatttatttacaaccctgttaattttgaagcgaaattccctcataatcaaccatttatatggctcaaagttttagtaagtgttgatcttgaggatggtggaagagaagtgatcgctgttccaaaccctgcgaagttgttaattggtatgggaagacgagactgtcaataccaagctcttgatgatttgtatcaatcatggcttgatgtgatatattattttagagatgctcgcgtgtgtgaaaaagttgctgatttgtgcgcatatagacagacgcgaagaagctctatgtatttattaagcgctctgttgagcttgcctagttgttttgctaataagaagaaatttaagtggctctgttatcgtttaagagagcaagggtgtctgaagaaggatatttatcctgtagcaaaacctataagtgcccataatataaggaaagaagattcaaatggatgcgatgttaatcaaggaacagatgattcgttctcacggaaaaagaatcgtggatgctgggagtatgtcccaaagatgttgcagactgatgtgtctgttcctgttactgataaatctttccacagtaacagaggctcgtcggtttccccaaccgattgcggtgatggagggtgctccagatccgccagctcgattggtagtaaaaataccaaacctcgccatagatttcgagctgcaggagttcaccaacccagcggtcgtgatccagaccgtataccgccgaatcatcgacgaagtgcctaaaggttggtatggtttaaagtcctggtcttcctccaattatggagacgttgtggccggactaaaaagggctgcacgagttaaagtgcatttttctataccgggttcagattgggcttataccttaaatctgtccgaagtggtatctgggttagcactccccaaattaccaattcccgagaaatatctcaggatgccgattgctatcacaatcgatgataccgtcaataaaattggcgatggttttgatgatgtaccatctccatggtacttgtatcaatgatgtgttcctttcatggaacctagtgaggggccctccggggtgtgctcagcacctagcctaagctaagtccatatgcccacctacgctgctccgggtggatgcttatacatgctatggatgcctacatttgaaataatgtagatgcctaatactctctctcagggagagagtttagatgcctccaaaggagatgc

SEQ ID NO: 496 - DNA, 2735 bp, Olive latent virus 2
  source 1..2735: mol_type = other DNA
gatatttcgcactcctagtgaatcttcctagtatatccgttgaaaaaacgagagtgcaacaacaaaaactacagagttctttttttttaaaaaaaaaaaaaaatcaaagagacatggccggagtactttatgatgaggagtacgttccccaggaaccggattacttgtattgcccgtacgagtgggagggtgaagatcctacccaatgcgatgcaaatgttccgtccgtcagctaccttgtggaggctgtaaaaaaatcctttactgagggtaaccacgatatgctgatttcttgcgagtcgtaccacgccgagtgttgcgagggtcccttgatgaacaagggtttgaccctctcgacttactttatgagttatccgggcatttcattacctgcgttcggcggtggtgtgattcatgtcacttcagctcgcgtctgcatgcaagctttttatgccgtgaccccaggaaggtgtagttgttcgtgtggtacgcaattcatctatcgtgccaaaggtggaactggtctaacatttgacgccacgaacactatttctagtgcctttaagttcgaagacgggaaagtgaaatggttaacagaagacctaggcttggcattattggctggttgtttcttgaaatacgtgccaatacctcatgagattgaaattaagatcgaaagaaaggtcgagcccgtgtctgctctggatttttgggaaccagaaggattgatttctgacgtacatttcgtacatccgcaagagagagccttggctcctgagcctccaatggatgtagagatggtgagattagtccgtacggaattgtttgaacactttaatcccacccttcttctgaacgctcggtcggatttttccggtgagaaactgaaagaggttgagttgccacgagctcaatcggaacccttagtccctagggtctgtctcccgcgaggtgatgacgctttaattgatcagtttttcatagacaaggcacccgagcattttaatcgtgaacctgccacagatcaatggcaggtggaatctgatgactttactgtggatttccccacccaagtgcgattacgcgaacgggacgaagattggttcagaaggaaacccgatttcgctgtgtcgtccattcgtacaggtctcgagatgcctcgaattgctacaaagaaggaaatgttaatggcattctcgaagagaaacgttggagctcctcagatggtagaggtacctcaggagatccacgtgaagaggttggctgataggttcttccggacattcttgaaagaaggcggctgggataagggggatggtcattattgggatgattttttccatagaaagggtcgaaaggtcttttcattggagaattgttacgatgaccccttgtcctcatacttagttatgctgaagtccgctgggaaattctctctagatctgaactttccggttcgatcggtaccccaaaccattacttatcatgagaagtgggttaccgaggttttttcccccatgtttctgcaggtgatggcaagatttttctctcgtctgcaagattgggttgttgttccggctggtccgatggctgacttctcccgtgtttggcctagctttgaggggaagtgtttaacagaaattgatctgagtaaatttgataaatctcaaggtaagctgttgcatgatgtgcagagggagattttcctccgtctgggtttcccacccatttggtgtgattggtggtttaaattccacgagtcttcctatttaaatgataagaaccttggtatagctttctcagtagattaccaacgtagaacaggcaatactgccacttactttgggaacacgttggtaacaatgattatgatggccgaagtgtatgaacttgattctctccctttctgtggtttgttttcgggtgatgacaacttgatcgtgactgatcgacctcttgaaggtcgagtttcgttattcccgaacatgttcaacatggaggccaaggtgatgcgtccgggtcagaattacatgtgtagcaaatacctttgcactgtagacggtcgcgtaacccctgtccctgatccttttaagttgctgaagaaagctggtgcctcgtgtcctttggagcaccttgatgacttttacgaatcgtttctggattataccaaatacctggtgagggatgaagttagaacattaatacccaggttgatggcccacaggtatcaagtctcgatggatgaagctggagttgctcttgatcagattatgagctggcgaaagtcaaagactcaattctttaagcatttccagtacaggaaaccaatcaaggactcgctcgaggctgtgaaatccgacttcctttctgctttcggaaaagtagatgatcgaataagagtttggcgcgggcgtcgaaccaatcataagaaggaggtcgatgctttaaaggtcccattggtgagttttagggagtgatggtggctcgcctagagcggtgtgctggtttctacctaaggaaccaggagagtggagtgacttggtcatgacaagtcgagtagtactttaactacgagtcgtcgttgagacgccggtccccttccaaggggatcgagagggttttcccggtactttacccgggattcgaattgagctgtctttgacagagctcaaactcctcgctagatactctaacgagtgtcttgaggactctcctatggagagtcagtaaagacc

SEQ ID NO: 497 - DNA, 7531 bp, Citrus yellow vein clearing virus
  source 1..7531: mol_type = other DNA
gaaaagcaaacattatcatacacaccccaaaaattgtgatcatcgtctctgcatcaacagctcagctaagaaccagagaaatggccactattaggggtgccatcgaacgcattacagacaccaccgtacgcactacacttcaagaggaggcatgccgccaaatacgcgctgaacttaaaaacgtcgaacacatcaaccgttacgctatacagcctgacgccgccgacgcactcgaacacctaggcattggttctaaccccttctctgtggcactgcacacacacggtgcctgcaaagcgattgagaaccaattactctatgtagttggtaccttactcccaaaagaacgtgtcaccatgctcttccttaagaaaagcaagctcaacatcatgaaacgctgccctaaattccaagacatcttcctgaaccaacatattgaaccacgcgacgtttctaggtactgcgactttaacgtccaatccacctccaccagcatacccacacgaacggcttacatcagtgacacactccactttatggaccgtagagacctagtccgactattcctaaacagcccaaatctagagactctctacgccaccattgttctcccagtcgaggctgcttacaaacaaccgagccgctacccagagatataccagattaactatgacttcgacggtttccagtacatacctggaggccatgggggcggcgcctaccaccacgagttcgaacagctgcaatggttagacactggccatatccactggcgtgggcccgactgtaaagagattcgcatgacaattaccgcccaaatgctcgaaagcttaggtgcgaatcatcttttctgcttcaaacgtgggaaactactcaccccacgtgtacgcactttcggccgagatacccaagtgctcttgcccaaaatcttccgcccggccgacaaaaactttaacagggcaataccactaaccctagctaacaaactactcctgtacgctaaatccattaacacagtgaccttccgcgacgtcgttgccaagacacgccaacttatgaaggacaaggagcttgaaacatacaccggcaacgacctgttgcatatggccaactatttcttcgctgttggagcactgtcaggagttaactcctatgaccaattgcttggcctatccgcctgggaagcctgcaccgtccgtatcaagaacaccataacaaatctctgggaaaagattgccggaaagaaagagttcggcaagctattggaggcccttgagtgggaaacattcacatactcacgtcaagtgaccgaattcaccgttacgggactgcccgccctgctccccctcccagacatctcagaccaagaagagattttcgcccagcaggacgagttagacaaaatcactgccggcgctaccaagatacggactattgacattatgcggggacaagctaaccgcgctaacccaaaaactccgatcaactcaacaccggcccagggaccccaactgcccgatacccccgacccaatcgaccaagctgcctccaaagacctcgtcaccaagcttcagaaaaacaaacgcatttacatccaagacgacgggccggaataccttatgggacacatggctgaagtccctgcctggtatcttgaacaagatgataccaccactagactcaaaaaccgctgcgcttggttcttcggcccacccacctacagatatgggcacaacgacattgagtacaccaccatagaatactacccttgggtcgagcgtattggagccattttcggcaagtacaacacctgtcttgctcaaacttacgacgccggagcccgtattggataccacgctgacgacgaagactgctacgaccccgacgtcaccgtggtcaccatcaacctcactgggaacgccaccttcctgctcaagaccccaaccggcactaggacctggaaacttaaacctggtgacttcattatcatgaaacccggtgcccaaaggtgcacaaaacatgccattagagattgcacaactaaccgcacatccttaaccttcagatggcaggcccgcacttgccccactaacctcagaaagatcactaacctacccaaagccaccaaccaaccccaaaccactgaatggcgtcctgtaactaaaccacgccctagcaccaccgcttccagcgacacccagaccccacttgtcatagaccaggaacgagggtataccaccacctccgacgtgacaccaacgattaggctgcccgccgaaaatggtaataacaccggtgctggaccctcctccgcattaaccctcgccgacctgaatgataaccaagcgccgaccactaacaaaggaaaagagaaacttgaggaaatggtcgaaactggcccaactatcatggaacgcttcctcaacaccgttcaggaaccaacacaagatttatgggactccgcctctgaatccgccgcgagctacctcgctgaaggcctcggcatctctgccatccaagcactcccttgggcacctcacttggaactcatcaatgcattaggcttccagggcactgaaaggcaatacggcccagacaactgtctcatatggcctatcacgcattacagagaattgcccagaagcaacaatgtcgaagcccctccggaagtgcttgagctgctcgactgcatcaatagataccccactgacgtcccaatgctcaaaactcgagccgccgccttcggttcagacgtcaagaatctacgcataggggcacttgttaagaaccaggacaaacagtggcgcgcatcactcgcactactttgtgaggaaaatgaacacctcctccctaccactgtaatacacggcgctggtggctccgggaaatcccacttactccaacagtgggtggcgtctactgagcgcggaaatgtagtcaccatcttgcccactatcgaactccttcgagactggcaaaacaaatgtccacatgcaccgaaagagactttcaaaaccttcgagaaagcgctcatccagaacagcgcccccgtggttatcatggacgactactctaaacttcccccagggtatattgaagcctacgtcagcctcaagggccagtgcaaacttctcatactcactggagatcctagacagagccactaccatgaggagaaccctgaggccttaatctctactcttgaccccgccacggactactttggcaaattttgcgcatacaacatcaacgccactcatagaaatgccaaaaccttcgccaatgcgcttggggtgtactctgaaaaagaaatccccaccaccatcacctgctcatcctaccagaaaagcggttggccaacacttgtcccatccatccttaaaagaactgcgctcaacgacatggggcagcgctcactaacctacgcaggctgtcagggactcaccaccccaaaagtgcagatagttcttgacaacgccacaccactatgctctgacaaggtcatgtacaccgcactatctagagcggtggaccaaattcacttcttcaacactggcccaaatcacactgattactgggaaaagatgaacgccacacctttcctcaaaactttcatcgaccacacacgtgaggagaccttcgctgagcaccaacctgccgaacccacagtgcgtgagtacgcaccagcaacgcatttcccaccggctaacgagaacctagcactagagccgtgggtcgaaccgctgactgataaacactcgcgggaactcttccactctgccttaggccacagcaactgcgtccagactgaaaacaccgtagtccaactttttccccaccaacaggccaaagacgaaacgctcttctggaaaacaatagatgccagaatcaagataaccaccccagaagagaacatcagggcttgcagcatagccactgacattggcgacatcttgttcctaaattacaaagaagccatgggtttaccacaagaccccatacccttcgaacaggcactctgggactcttgtcaagccgaggtgcaactaacctacctcagcaagcctctggctgcactcgcaaatgccgcccaaagacaagaccccgactttgactccaacaaaatccaactcttcctgaaatcacaatgggtcaagaaagtcgagaagatgggctgccttaggatcaaacccggccaaactattgcttccttcatgcaacagactgtcatgctatacggaactatggctcggtacatgcgccgcatccgcacctcactttgcccacccgaaattatgatcaactgcgagaccaacccaaaccaaatcggaacatgggtgcgtgagtattggaacttcaacacccagagccatgagaatgactttgaagcgttcgaccaatcccaagacgccaacatgttacaattcgagctcattaaggccaaataccactcaatccccgaggagatcatcgccgggtatcgacacctgaaatgcaacgcccacatcttccttgggactatatcgatcatgaggttgtctggtgaagggccgacctttgacgccaacacagagtgctccattgcatacaaccacacaaggtactttgtgccgaaaggcaccgcccagctctacgccggagacgactctgcatgcgcgtcgcccctctctgaaaaacccagcttccaacatatctcaccagagctcagcctcaagtctaaggccaagattagaacccaacagaaaggagactttgcgaccttctgtggctggctcatcactccaaaaggcctgatcaaaaaccccacccagctttacgcctcctggttattggctaagcacaacaaagatctcgcggacgtggccagaaactatgccttggacttacgcattgcctatcaacttaaagacgagctctatgagttattatcacctgaagaacttgaccaccaccaactgctcgtccgagagatgatcaagcacaaaatgggccatctcctcaacctccctgaggggtttaaaacaaactaactcgaaatggacttacctgagctcctgctatccaaaaacttcattcgcacccggttacccctcgccaaacccattgtcatacacgctgttgccggcgccggcaagacacaacttcttgaagaattcgcgcggtcctcaccctcaaccaaaatctactcacctgtgaaacatcactccaactcactgctgctctcgcccttccacaaagctctctctgaagcttccattgtcgacgagtaccctctaagccagatacacgagaacgtcgagtacatctttgctgaccccatccaataccttggtaatccaaaccttagaaaaccccactacatctgcgcgtcttcccatcgatttggccattccaccgccgctctcctaacaaaacttggcattgaaacttacgcacataaagaagataccgtccgggtagacaatatcttccaggctgaaccagacggccaaatcatcgcctgcgaccgacccactcaagagctggctgccaaacacacactagactacctgaggccctgcgaaagcataggactaactttcccacgaaccacgatcctgatctctcacgaacttactgcagacaccctcaccaaagagatttacatcggtttgacccgccactctaaccaccttctcatactcactccggatgcctctacaacctcctcctgaccacacttgggctttccgactactagctcttggcgccgccttagcactgctcactttcacgctcaaccgagacacaagtcgtcacgtcggagatccttctcactcacttccttttggagggtactacagagacggcagcaaagtagtccattataactccccgagagccacaaaacctagcaccccttccttcctgtacctggccccaatcttactgatcctactaattcatgcagtcaatagatttactaatcctcgccattcttgttcttgcactcattgccagcctattccccgcacctgaaccttgcacaattgtagtctctggcgcctcagcctccgtaactaactgcccaaaccccgaacaacttgcagagctagtcagagcgcttaaaccggctaaaccggtttaaaacttaacacaaactcgaactcatgagcttcgactacactcaccctctctaccgcagctatccatttccacactactgcgagttcgaccggcaccaactctgcgaccatcatccagtactcaaacctccaactcacaaacccagcgccccgaactctctcatgtctaccaacgacaacaagggcaaagaaccacttcacccgacaccttcgggccctaacgacacgaccccgaaacctatccccgtacccactccctcagttacgcccacagctgcaggtaaggaaaaccaagaacccatcgaaaagcgtatcacacacgctttccacgctgaagcaaaaacccacaacaatggggtctctccacctgcctttaacccgaacaacatgaatgctgtgccgctgaacctgctcaacctcaacctaagatactcaccggtcactaactccatagctaaccctaaacagactgaggctatcgggaaagcttgggtccgcatcttgaacatcgatcctgccaacgtgttcttatacgccatcgacctcgccagagcttgcgccgacgcgggctcttcccctgaagctgatattattggagcgaacgaagatctcaaccccgttgttgaacgaaacgcattggccctagtggttagggatttctgcccgctgcgcgctttttgcgcttactactctcgggtggtatggaacctcatgatcaaggcggaccagcctccggccaactggatgaaatccggggtagacgagaacgcgaaattcgcggcattcgacttcttccatggtatcctctcgcccgcttccctgtatgtgcccctagagagacaccctacttccgcggagaggatcgcaaatcaggccatgttcgctgtgaaaattgccaacgctccaggaaatggcacggacctcacgatggaccacgttgccttcaccaaaggaaggactacccagcactccggcctccgcccgacccctttcaacatctaaccacctttgaaccaatactcctagcatgcctacaagcccttaaaccacttccccccgaaatccaaatagctatcatttcgtgtgtgtgtgacttctttaatttcttacgctgtgccagtagcaagtaccagggcaccagccgctcagctgttaaacgtcgagcggcccgcctgaactactgctacaagtgtgggcaccccttatatctaaataaacctcacccctgccgaccaggtcaattgtgctctgcatctatctccgagcgcctctgtttgctccacacaggaccgattaggtttctaaccgaaaatcctgttagtgccagagcagctcacttcctagcgcacgagctccttgaccccagatgaaacataaatattcaggctttcagtttccattttctg

SEQ ID NO: 498 - DNA, 7890 bp, Potato latent virus
  source 1..7890: mol_type = other DNA
tcggataaaccaaaccaacaatatttacacatactcaagttaaacatacactgttcaatcttgcgtacgttattatggctttgacttacagaagtccattggaagatattgttggtgcatttgaaccaagtgttcaaacagctattgcgaacacagctgctaaccactacaagcagcttgaggaagagaagggaatcttatttaattatgcattgccacctgaggccaaacagaggttaataggcgctggcatatatttaagtcccttttccgctgttccacattcgcatcctgtgtgtaaaattttagaaaatcatctgttgtatgtagagcttcctagtagactagataattcttttatgtttgtaggtattaaaaactttaagttggatctgctcaagcgcagacatgcaaatctaagcatgatccaaactatcaatagatatgtttgtagtttagataaaataaggtacggttcaaatttcgtagttagatctagcgctagttatccagagctttgcagacgcaaaggtgagcttgacggagcagtgttgagggaattggtgcctgagttgatgattaaaagcgctaagaatctattcttgcacgatgagcttcattattggacccatcgggatctgattaccttcttggaggtactgaagccagacaaactgttgggcaccttagtttacccacctgaattgctaaagggtgcgaagaaaagtttgaactcttggtgctacacatatagagtggacaaagacaaattgtttttttatccagatggcgtccattctgaaggctacgagcaaccattgagtggcggttacctcctcgaaacaagtaggattaccacacgtgatggtgaagtttattgcgtcgatgttgtgtgcagtaaattcgcgcatcatttgattgcaataacccgtggtgatctgattgtacccacacaacgcagttttgctccctttgaggccataactagtaaaggtttgaataacttggtgaggggcaaggtggaatgtttccccgtatgcgcaagtgtagtgtctaaattgtataggtatttgcgcacactcaaaaaacccgatgagcaatcagcaatggccaaattgagccaacttcaggcaaatcccactggggaagagatacatttcatccagggctttgccaaattggtgataaatacaaacaaaatcgacagtttaatcaactgcgatagtattaaggtgttcatgggcaaattgtttggtccgttgcccaattggcttaccaagagattgaggagcgtgcaagaggtgtctctcgatgaatttgtccattactttgaaccatatgtcgtcaacgtgcccactaagcatgtgaactatggttttgagttcaattacgtaatggaagatttcaggtacgagcagggtgagaatgatctagtggatatgctagacaattttgatggctccacaaagatgagcacaagcctttgcatgatgaccccatacgtcggcttagcaccattgaccacgcgacgcaaattcctatgccatatcgaggagaattccatattcagagtggtgtctaggaacatcttttgtagctacacaaatagttacaaagtggccgtgagcactgagggggtggttcggatacttgagatttatagcaaagtgtctgtggatctactgggagcgtatttgggaaaattgctcaagaaaacagagttcatagagagagtgcgatcaagggttaaggcaattgccataaagcacctcaagtacacttggcaacaggttggtctagcttggttcaccagtggaaggcgtggctacacaaaatacattgattgcagcccatacacgatgaataccttcaaagagcttaaagagagatggggtgtgattgtgcgtgaattgtctaaacagcaggacaacgctgaagctgcgaaaaacatacctgagcaggaaattcaaacgaccagcaaaccaagttgtgtggagaagcgaaattacttctcgaacactttgatgactagctttgctgcgtcaggagtgaaaggcaaggaacaggtgagctccgaaattgccaagggtaggggtgaaaggagcgaattgagggcaactaaattgatgggctcatgcagcaccctcggcaaagtggctcacatagcatcaagaaaaggctccatgggggtattggaatgtgtagcgagggtcatcaaattggatttccaaaccgccttgaagttccttagagtcaagggtgtgtggatgcaggagtatgagagcataggcgagttggaggaggagcagatacagagtcctgcatatgatttttgtgctgcgatcgcaatgaccttcaatgttgaaattgaattgacgttcccaggctcagagcttgtttaccacttcgctgcaagttcaactgtgagttgtatccgcttgagcatttgggaaggcgtagtcacactgatgagggctgaaaatgattgcgttatcactgcatgtgcacaagctttagctagggagcctgaggatgtagtgaaggtgctcaaagatagattggaggagagcatactggaagagatttggaacggcgaaggggtgcctttcgagagaatgtatctcttctttgaagctctggatattcaagcacattgcaatcgcgatggtgcacagctagtgttgaatggcgggggcaagctggcgcgatgtttcgtgattaaagaagatcacatcgagttcgcaggtgagaaaaaggtcagtagagtacttgagctccaggatgctagaacaagtagtaaagcagacccagaattggtcaaggagtttcagaaagccgggactgtggtagaatatgtagcagtgcaatccagagcgcaagtcctggcgaagagtctagtggatgcaaccactggggtgtgcagctcaaccatattcaatgactgtgagagcttggaacgttcctttagattcaccgaaagcgaactagcgcgaaatgtttgttgtgttatcggtacgtttggggctgggaagagtaccctgttcaaggatatgatgaggcagtgcctagggaaaggtgttcactacgcatcacctaggaaggtgttggcgaatgagctcaaagctagtttgggtttggcaaaagggaagcggaatcgaaaagtagggacagagaattggaatgtgcacaccttcgaaagtttcctaaagaaggcgaaaaatgttgcagagggtgagttggtgatcattgatgagatccagttgtacccgcctggctacctggatcttctactttacctcatacctgagttcactagcgtcttcgcggtcggtgatccatgccaaagtgattatgacaacgagaaggataggcatgtcttcttaggggttgagacagatgtctgtaggcttctgagcggccgtgagtacgaatttaatgtactttcccgcagattccacaacttaggctttgaaagcagattgccctgcagattcaaattcccggctggagcagtcaaggaagagtatttgttcgttaattcaatgactgaggctaatgagttggacagcgcctacaaaagtgtgtaccttgtgtcatcccacttggagaagaaaatagtggagtaccagagtgacgttaaaacgccgaatgtgctgacgtttggtgagtcgactggttgcaccttcaagtatggttgcattctcatcacgcaagtgagtagcgcatgtagtgagcgcaggtggatcactgctctatcgagattttctcacaatctctgtttcatcaatgcaactggtgtgcccatagaaaatgtggcgaagagttacaaagacagaagtttgggaaaattcctgtgtggaactgctgttgagggtgatataaaatcaatggcttatgggaccccaatcttcaaagagcagttcatcgccggcgttgggcgcgatgaaggtgtcaaggaggataaagtcaccggtgatccttggttgaaaaccatgttggatttgatgcagctcccagatgttgaggaagcagagatgatgcaggaagagatgcaagaagagtggttcaaaacccatttgccacaagaggaaatagaaggggtcagatgccgctggattcacaaaatgctagctaaagaagcgagggaatgtagaatgggatcgatcgtttcagaccaattcccagatgatcatagcaagcaagaggggaagcaaatcactaatgcagctgagcgttttgaagctatatacccaagacatcgggcaaacgacacagtcacattcattatggctgtgaagaaaaggctgagattttccaggccttctgttgagaaagcgaagctcacgcaggctgaatgttatggaacttacctgctcaaaaacttcttggatgtgatcaagctcaagcccgcacatgatgaggcaatgatgatcagagcgaaggaagattttgagcagaagaaggtgagtaagagtgctgcaaccatagagaatcacagtgggaggtcatgcagagattggtgcatagatatagggcagatcttttcgaaaagtcagatatgcaccaaatgggacaacagaatgcgggtagctaaagcagcacaaacgattgtttgctttcaacatgccgtcttgtgccgctttgctccctacatgaggtacattgaaatgaagctgaaagaagtgctgccggctcggttttacattcatagtggcaaaggtttagatgagctcaactcttgggttaaagaaggtaggtttgagggagtgtgcactgagtccgattatgaggcttttgacgcttcgcaggaccagtacatcgtcgcttttgagttggcactgatgaggtaccttaggcttccaaatgacctgattgaggattacaagtacataaagactcacttgggttccaagctggggaattttgcaatcatgcgcttctctggtgaggccagcacttttctattcaacacaatggcaaacatgctcttcaccttcatgcggtatgagcttcatggcgatgagtacatttgctttgctggtgatgacatgtgttcatcaaagagattgcgaatcaagaaaacacatgaaagctttcttggaaagctgaagttgaaggctaaggtgcaacacactgagaagcccacattttgtggctggaatttatgtgctgatggaatatacaagaagccacagctggtctttgagagaatgtgcattgccaaagagctcaacaacctgcacaactgcatcgataattacgcaatcgaagtggctttcgcttacaaacttggggagctggctgttaacaggatggatgaagaggaattgggggccttttacaattgcgttaggctcataacaaaattcaggcatctgctcaaatccaatgtagtggaggtctttaagcgtaaatagttgttactttagcttaggttagctactatagatttgatatatggatgtgcttgtgaataaagctttagagtttggtttcaaaagattgagttccgtgctgaagagtccgattgtgtttcatagtgtgccgggtgccgggaaaacgaccttgataagagcgctgcttaactcagacagcagattcgagggttggacgctggccgagggagacaagcctaaccttgaaggagtggtaatcaggaaatacgttggtggagaagttggtccctttgctctattggacgaatattgcgtggaaccggaaattgccggtaaactttacgctgtattcggagatccgctgcaggtgaacaacattggtttcctaagagcaagctggattaaagtggaaactcaccgcttcgggaaagccaccgcgcaattgctaaatcaattcggttttgaagtcagttcaagcaaggcggacattttggtcattgctgatatttttgtgggtgaacctgagggaacagtggtgtattttgaagaagaggttgggtgcttactaaagcgacatagcttggaggccgtgcacattgatcttgtgaggggcgatagttttcctgtagttacatttgtcacatcggaaaattgcatgatattggataaggtgcgcagtttcaattgcttaacgagacattctgagaagttgatcatcttgtgcccaaatgccacttactcccccacctgattacaccaaagcaattttggccgcttgtatcggtttgtcattggctttgctcgtcggagtttactctcgtagcaccatacctgccgtgggagacaatttgcattcattgccgcacggcggaacatacctggacggcacaaagcgaatagtttacggcgctccaaataagctgaattctctggagggccaacgaactttatcaggtcaaccttgggccattgttatcgtgctgatagcggtaatcatattgttgagtcgattcaactccacttgcgcacactgcggtagatgtcattgaccgcaatttatttagccattggtctgctagtcttcagcgtgtctgtgtatttaattcagccaaatctgcaggattcgtgctcgatcgtgattactggggaaagtgtgcgaattctcaattgcagggtgactgaggccctacttcgatttgcactggaggcagagcccaagagcgtgaagatcccttaggtttactgggtttgatttgaatatggatcagaaaggaaaacaaagtgagagttcaagtcaagctgtggcccctgttccaaaaccaccgctgccccctccgatcaggggcgaagaggcggttaatgaaggcaatgaggaggcgaagatggagcgacgcctagctctcttgcatcagcgcttgaagggtgagcggaatggcacacgcattaccaatccgagctttgaaataggaaggcccagtctgacgaggcctgatgatatgaggagggatcccgccaacatattcagtaggttgtccatcgatgatctggcgcagatcaagccaacacctgtgtccaacaacatggctaactcggaggaaatggtcaagatcgctgtcgctgtggaagggctgggtgtacccactgaacaagttgcaaatgttgtactgcaggcggtgatttactgtgctagtgcaagtagctccgtgtatctggatccacatggtacaattgagtacacagggggagcagttgttcgtgattctgttgtagccatcatcaaaagggatgccgggttgaggagggtgtgtcggctttttgcgccgttggtctggaatcacatgttggtgcacaactcacctccctctgattgggctgctatgggcttccaatggaatgacagatttgcagccttcgactttttcgactatgttgaaaatgaagctgcgatacagccgttggatgggttgattcggaggcccacaaggtctgaaaagattgcgcacaacacacacaagcgacttgcactagacaaatcgaatagggatgaagtgttcgcaagtttggaaaccgaaatcacaggtgggaaaagaggaccagaaatcagcaggaatttccgaaatgcagccaattagccactatgaagccaagctcctagccgtgtctttagctatgtataagtttacgggacgttgtgagcccgctgttgctttaaatattgttaataaagcttgtaatgttggtatgggcaagagcagcttcgcgcgcaggcgtagggcggctctcctggggcgttgtcatagatgctttagaacttccatggccacacgttgcaatggtgtgacttgttatccgggcattggagctaagccaaaaatcgagatgttcatcaaatacggtgtaagtgagctgaaaccgtaattgagttgtgcataaaacctaattaattttaagtgtgcaactataaaataaataaagttttaaatatttttccttt

SEQ ID NO: 499 - DNA, 6495 bp, Apple stem grooving virus
  source 1..6495: mol_type = other DNA
aaatttaacaggcttaatttccgcgctttacgtcaatggctttcacttacagaaaccccctcgaaattgcaatcaacaaacttcctagtaagcagtctgatcaactgctttccttgaccaccgacgagattgaaaagaccttagaagtgaccaaccgcttcttctctttttcaatcacaccagaagatcaagaattgttgactaagcatggtctaacacttgcacctatagggtttaagtcacactcccatccaatatccaaaatgatagaaaatcatctcctgtatatatgtgttccgagtcttttatcctcctttaagtcagttgcctttttttcacttagggaaaataaagtagacagttttcttaagatgcattcagtcttttcccatggaaaaattaaatctttggggatgtacaatgctataattgatgggaaagataaatataggtatggtgatgtagagttttcatcttttagggatagagtgattggtcttagagatcaatgccttacacgtaacaaatttccaaaagttctgtttcttcacgacgagttgcactttctaagtccatttgacatggctttcctatttgagacaatcccagaaattgatagagttgttgcaaccacagtttttccaatagaacttttattcggggacaaggtctctaaggaacccagggtttatacctacaaggtccatggctcttcattttcattttatccggatggtgttgcctctgagtgttacgaacagaatttggcaaattctaaatggcccttcacctgcagcggcatacaatgggctaacaggaaaattagggtaaccaagctacagagtctcttcgcccatcatgttttctcatttgacagggggagggcttgtaatgaatttaatcatttcgacaaacctagctgtctacttgcggaagaaatgcgccttttgaccaaaaggtttgataaagcagttattaacagaagcacagtctcttccctcagtacatacatggcttgtcttaaaactgcaaatgcggcttcagctgttgccaagctgaggcagttggagaagagggatctttacccagatgagttgaacttcgtctattcctttggagagcatttcaaaaattttgggatgagagatgactttgatgtgtcagttctacaatgggtcaaagacaaattttgccaggtcatgcctcacttcatcgccgccagtttctttgaaccaacagaatttcatttaaacatgcgcaaattgttgaatgatctggctactaaaggaatagaggttcccctttctgtgatcatcctggacaaagtcaacttcatagagaccagatttcatgccaggatgttcgacatagcacaggcaatcggggtgaacctagatttactggggaaaagatttgattatgaggctgagagtgaagagtacttttcagagaacggttacatctttatgccctctaaatcaaatccagagagaaattggattctaaattccggttcgctgaaaattgactattcaagattggtaagagccaggagatttagattgagaagagatttcctagatcccatatctaaaggaaaatcccctagaaaacaactcttcttggagtcaacgggaaacattaaatcaaatcccaatgctgaaaaaaatagcgagagcggcgaaataaagattgaaggcagtgccgaaaatgatcagccacatgaggtatcacatacttcaatggaaaccgaggatggacagggttttgaaggttcaataccagttgatttaatcaattgctttgaaccagaagaaatcaagcttccaaagagaagaaggaaaaatgattgcgtcttcaaggccatctctgcacacttggggattgactctcaagatttgttgaattttttggtaaatgaagacatatcagatgaattacttgattgcattgaagaggacaaaggactgtcacatgaaatgattgaagaagttttgatcacaaagggtctttcaatggtttatacttctgacttcaaagaaatggcagttcttaatagaaagtatggagtgaatggcaagatgtactgcacaattaaaggcaatcactgcgagctgagttccaaagagtgcttcatcagattattgaaagaaggtggtgaagcgcagatgtcaaatgaaaatctaaatgctgattccttgttcgaccttggaagatttgtgcataatagagacagggctgtcaagctagcaaaatcaatggcaagaggcacaacaggcctcctgaatgaattcgacctagaattctgcaagaacatggtgaccctttcggagttgtttcctgaaaacttttcttctgttgtcgggctaaggcttgggtttgcgggttctggtaaaacgcataaggtgcttcaatggattaattacactccaagtgtcaaaagaatgtttataagtccaaggagaatgctggcggatgaagttgaacctcaactcaagggaacggcctgtcaggtgcatacatgggagactgcacttaaaaaaatcgacggaacttttatggaagtttttgttgatgaaataggtttgtacccacctggataccttacactgctacagatgtgtgctttcagaaagattgttaagggacaaagtgaaaatttcttgaaaggcaaactgttggaattgtcaaagacttgcttaaacataagatgttttggtgatccattgcaattaaggtattactcagctgaagacaccaatctattggacaaaacacatgatattgacctcatgatcaagacgatcaagcacaaatatcttttccaagggtacaggttcggtcagtggtttcaagaactggtgaacatgcccactagagtggatgagtcgaaattctcaaggaagttctttgcagacatttcaagtgtaaaaactgaagattacggactcatcctagttgccaagagagaagataaaggtgtcttcgctggaagagttcctgtagcaacagtgagtgaatctcagggaatgaccattagcaaaagggtgttgatatgtttggaccaaaatctttttgccgggggagccaatgcagccattgttgcaataacaagatcaaaggtcggctttgactttatccttaaagggaattcattgaaagaggtacagaggatggcacaaaagacaatttggcagttcatcattgaagggaagtctattccgatggagaggatagtgaacatgaatcctggagccagcttttatgagagtcctttggatgttggaaattcatcaattcaagacaaagcttctaatgacctgttcataatgccttttataaatttggctgaggaagaagttgacccagaggaagttgttggggacgtaattcaacctgttgagtggttcaaatgtcatgtgcctgtcttcgacacagatccgacgcttgcggagatttttgataaggttgcagcaaaagaaaaaagggaattccagtctgtgctgggtctttcaaatcaatttcttgacatggaaaagaatggatgcaaaatagacatcttgccctttgcgcgacaaaatgtttttccacatcatcaagcgtctgatgatgttactttctgggcaggtgttcaaaaaagaattagaaagtcgaactggagaagggagaaatcgaagtttgaggaatttgaaagccaagggaaagaacttcttcaagaattcatctcaatgctaccgtttgaattcaaagtgaatatcaaggagattgaagatggagagaagagctttttagaaaaaagaaagctaaaatctgagaaaatgtgggcaaatcattcggagagatcagacattgactggaaacttgaccacgcctttctcttcatgaaatcacaatattgcacgaaggaagggaagatgttcaccgaagctaaagctggccaaactttggcctgtttccaacatatagtcctatttagatttggacccatgttgagagcaattgaaagtgcctttttgagaagctgtggagactcatactacatacactccgggaaaaacttcttctgcctggatagctttgtgacaaagaatgcaagtgtctttgatggattttcaattgagtcagactacacggcctttgactcatctcaggaccacgtcatattggcctttgaaatggcactgttacaatacctgggcgtgtcaaaggagtttcagctagattaccttagactgaaattaactctcggatgccgtctcggatcactagcaataatgaggttcacaggagaattttgcactttcttattcaacacatttgccaatatgctgtttactcaattgaagtacaagatagacccaaggaggcataggattttatttgctggggacgatatgtgttccttgagctctctcaaaagaaggagaggggagagagcgacaagattgatgaagagcttttccctaactgcagtagaagaggtgagaaaattcccaatgttttgtggatggtacttaagtccatatggtatcattaaatctccaaaattgctgtgggccaggatcaagatgatgagtgagagacagcttttgaaggaatgtgttgataattacctatttgaggcgatatttgcctacagattaggtgagaggctttacacaattttgaaagaagaggattttgaataccattatcttgtcataagattttttgttagaaattcaaaattgttaacagggttgagcaaaagcttgatatttgaaattggggagggcatcgggtccaaatggctatcgtcaacgtcaaccgcttcctcaaggaggtcgaatctacagacctcaaaattgatgctatctcgtcctcagagctttacaaggatgcaacctttttcaaaccagacgtgcttaattgcatcaaaaggtttgaatcaaacgtcaaggtttcctctcgatctggtgacggcctcgtcctgtctgatttcaaactgcttgatgacaccgaaattgattcaatcaggaagaaaagcaacaagtacaaatacttacactatggagtcatcctggttgggatcaaagcaatgttgccaaactttagaggcatggaagggagagtcattgtatatgatggagcctgcctggatccgaaaagaggccacatttgctcgtatcttttcaagtttgagtctgactgttgctactttggtctcaggccagagcactgtttgtctaccacagacgcaaatttggccaaaaggtttagatttcgtgtggactttgattgtccacaatatgaacaggacactgagttgtttgctcttgacattggagttgcatacagatgcgtcaactctgcaaggtttttggaaaccaaaactggcgattcaggatgggcttcacaggcaatcagcggctgtgaagcacttaaattcaatgaggaaatcaagatggccatcctggatcgcagatccccgctgtttctggaagaaggtgcaccaaacgtgcacattgaaaagagattgttcagaggtgacaaggttagaaggtcacgctcaatttccgctaaaagggggccaaactcaagggtgcaagaaaagagaggatttaggtccctctcggctagaattgaaagatttggaaaaaatgagtttggaagacgtgcttcagcaagcgaggcgccaccgggtaggagtatatctatggaagactcacatagacccggcaaaggaacttctgacggttcctccccctgaaggatttaaggaaggtgaaagctttgagggcaaagagctttaccttcttctttgcaaccattactgtaaatacttgttcggtaatattgctgtctttgggtcatctgataagacccagtttcccgctgttggatttgatacacctccggttcattataatttgacaacgaccccaaaggaaggggagactgacgaaggaaggaaggccagagcgggttcgtctggcgaaaaaacaaaaatttggaggatcgatttgtcaaatgttgttcctgaattgaaaacctttgctgccacttccaggcagaactctttgaacgaatgtacgttcagaaagctttgcgagccatttgccgatttggctcgagaatttctacatgaaaggtggtctaagggattggccaccaatatttacaagaaatggcccaaagctttcgaaaaaagtccatgggtggcctttgattttgccactggtctgaaaatgaatcgtctaacacctgatgagaaacaggtgattgatagaatgaccaaaagactttttcgtactgaaggacaaaaaggggttttcgaggcaggttcggaaagtaacctggaactggagggttaggagtcgtgtgaaattccgcaaacttggtcgcggtcttgcaggttgacatgcctgcctttatacttaattaaagggttcccccggttttctgagcatttccgggttagtgtggtttttctagagtctagagtttgtccactct

SEQ ID NO: 500 - DNA, 8747 bp, Citrus leaf blotch virus
  source 1..8747: mol_type = other DNA
gaaaagcaacgaaagcaacctacacaacccaaaattaatatattgcaataactgttatcactcaatataagccatggctttgatgagcaacaaaactgcaattgaatctattttgggtaactttgaaaagaaacacgtcgatgcaatctacaatgccgccgcacaaactatcctctctcactctgaatttaggaataagcattttgcttattcactcaattcttatcaaaagaagatagcctcaaaggtgggtattgaattgtatccaaatggttatttaccacattcccatccattgtcaaaaatttttgagaaccatttgctttttgatgtacttcctggcgtagtaaatactagtagattagttatgtgtagcataaaggagtccaaagttctggtttttaaagggattcgcgacaaatccagaagacaggtttcagacctcaatgccctcaattccttaaataatagtcatacatcattcattaataggttagttgcatccaaagatgtgagtagatatacggaagaagctgatgctttttttcaatccaagaaagggagtccggagctattttcaaggaatttcatcaaaagcttggaaaataaagaggctgttttttttcatgatgaagttcatcactggactaaggcccaaatgttctcatttcttaaaagcacgaaggtcaaaaggttcattttcactgtagtctatccaccagaaattctcaaaaaatttgccaattcccagaacccaaaggtttatgatttcaaagttgataagggtcggctttttttttttccggatggggttaagacagaggcctatgagcagaaattgaatatggagtggctcttttcagcatcacatcttcgcagtggagactgtgtatggactgtaacaagacataagagtatttatgctcatcacctgtttgagatatccattggcgaactagtcacggactcaaaactttttttttccgattataactccattgacatgtctaaaatatttcttgatcgttttcggagttatgaggtattccccatttcgattgagcacctttataaggtctactcttatctgctttgcctcaaaaaacctgacttggagagtggtctagctaaattaaggcaaattattggagatgatgtcgaaatcaaagaattcctcttctttgaacaattttgtaagcgcttaattgaacgccaaacctcttgggggctatttgggcactctttctttgaaaaattaaccgatatggcattgtcatccttgcccaactctatagcccgaatttttcctcaatggaaaaaaaaaaacacatttgagttccttttctcacttgggactcttgttgtggatgtggagagaaaggtgtgttttgaacatgtgcttgaggaatggggatttgaagttgttatcactgatgaaaatgcctatcttgatccactatctatctttgctatcaatgaaaattttaatgaggatagagtggacgatggttatttggaaagaatccgtcttcccttctggaatctgaatgactatgacttgaaaagaaagagggtaaatgcgtataacattctctcttatcgatttgaagaggagcgaaaaattgaatcagcgcaaaaaggtccaaataagatgctccagattgagtggtacgggattaaagaatttaaagttgacccttttatcagcaactccataactgaatttactcttttagaagcattgctgggaaagaggatagatccaaaaaaatactcatattcaaagcaagcctgcactctttccaactatctcacatttttgtgtgctgagggtttggatggattcaatttggaagagcaccttgaacgaaggttgaaagcggccggtcatgacgtttcagatgacgaggaggaagaattgacttcagctgaacaagcggggcctatcaagatattggctgatccacttggttttatgaaagagtgtttggaggagatcccaatcgaaactgaaccatcactggaagaaagagggcagttttccactgattatcattctgagaaatttgaaatcaattacaatgacatttttaatcctcacaattgcatgaacactcacggcgatgaaattcccacaccgtcagatggcaattgttttttttcagcatttactgaaacttttgaagttgaaagacctgacaccttgaggtctgatttctcagactggcttatggaatttaatggggggtcctatgcttcacttgcagaaatgatcagaccgaatggagtttttatggaggcagaactcatatacttgttttgtgtatttagaggagtcacgttgattattcatgatagaactcatgaaaaagagaatgtttatgctgtacaccgcgggtttgaggagggccatatggtacatagaggcaatcattttgtcgggattgaaacttacaatattagtactttaacctcagaccccttacttggtgacatcccatgcggtttttcagaggaaattacaaaattccattttcggcctgatcatttcaactgtgcccagttcagaggaaggaaggcggcttttatcaccaaagttgatgcagattacgggcacaacggtatggtttacccccacaattcatgggtaccttctttagaagagatcattcagatctgtggtcagggagatgatttcaattgtgcattaataaatttctatgaggcaaactcatctcttgggttccatagggataatgaacgggtgtacaatgatgatcctattttgaccgtctgcacattcggtgaaggtagattcaccattgaatttaaggatcaggtaacttcttttctaatgactgctggctctttctttttaatgcctaaagggttccagaagaaggcaagacactctgtctcaaatgaaatgtcgagagtctcgattactttcaggaagcatgttagaaggttgaatgggtcaccgattgccatcagggaagaaaattacaaaaatacatgcctcattaatgccttttcaaaagcaatgaaaaggagcaaacaggcaatcattgcaaaactgaagactgttaatagccctttctggagtagatacctatctgagggtaacggtggctccattgaagattgtcaatcggcctgtgaggcactggatgttactgtcgaccttaatgtaaatggaaaatgtgtggttcttggaaaaggggctttaagaatctcaatggctttaagaaacaaccatttttcagttatcaatgctgcacaactgatggagaggacttttgttagccacttgcttgaaaaaggaaatgtcaatgtgttagaaggatttgacgcaatgctaagtggtgatgtgggcgcagcaggtgttaacaaaattcaatttgcagccaattttgaatttgctagaattttggcaaattcatttctaaatatgacaactggcatctgcctgggcaaggcattggataatggggaaaagtattttctccacattttgaaagatagagtgaaacagattggtatagacgtcacaatggtgtgcggatttgctggatcggggaaaagtcgcaaactgcagtcctggctgcattcaaggaaaaaagggaacttctgtgtggtttccccaagaacaaacttagccgctgactgggcattcaagttagaattagagcccaatgaacagagaaaggtttcaacatttgaaaaattcatcaaaactgataaaagcaaattagatctcatagttattgatgaattgacattgtttccaaatggttacctggatctcctcgtgtatgaattggctgatgtcaataggcattgtcaaatcatccttctgtttgatccattgcaagcaagataccacaacaaaatggatgaatcaatcctgacatttgaacatgacgtggacaggcttattggtggacagaacattgagtacatttacagcacgcatcggatgtccagatacttcaatagattttttgatgtaccttgcttcaatcaggctgatagaacagaggaacaaaggttgtggatatttgatgacgtttactccataccatccatttgctccgaccgtcaggaaccatgtgatgttcttttggttgaatctgaccttgaaaagaaggcattttcacccatcataaatgttatgacatttggtgaatcccagggactcacatttaatcatgtttgtattttgctgtcagagtccagtgcagcttcaaacgaatttagatggatggtggcgctgacgagagcaaggaccaggttttcactctgttcaaccttcttaggtggaattgaagaatttaaagtcaaaaggaaggaaagtctcatcacatccatactccaaggcgagaagatcacattcaacagattaaatctgatgctgaaatgcaatttaattaggagagaaaaagaaaatgggtgcagagatgaggtcgatagggaggaaaggttggagggtgaccctttcctcaaaccatttatcttcttgggacaaagagttgagaaggatgaagatgaggtagaagaagtgaagatcagggaaccaacctgtcaaactcatctgtatataacagagcctaattttggtttgtgctacaatttcgacttcattagggaaaaagaacagcgggaatacagagaggatatgcttgtaactaaccaattctgtgacagttatgataaggttcatataaacggcaaaagagaaacccctggtcccctgcgattcaaagcgatttatccaaagcactcagccgatgatgacatgacgttctggatggccgtcagaaaaaggcttgtatttagagaagaggaggagaattatcaaaggttgtcaagggcgcatttagttgggggtttgctatacaccaacttcaaaaaaaaaatgggcctggaatttacgtttgaccaaggtctactggaggaaagcataaatgcatttgaaaagaaaaagctggaaaaatcatgtggcacaattaaatctcatagcataaggtcggacattgattgggcgctgaatgatgtatttcttttcatgaaaagccagttatgcaccaagtacgaaaaacaatttgttgatgctaaagcgggtcaaactcttgcctgttttcagcacctgattttggtacagttcgctccatggtgtagatacctagaaacccagatcagaaatcagttgcctgaagaaatttacattcactcaaataaaaattttgatgatttgaatgcatgggtcaaaaaatttttccagagggatatctgtgttgagtctgattatgaagcatttgatgcaagccaggatgaatacatattatccttcgagattcatctgatgaaagatgcgcattttccgcagaaaatcattgatgcatacatagaccttaaatgcaaattgggatgcaaattgggccatttttcaataatgagatttacaggggaattttgcaccttcctattcaacacactggccaatatggcattcactatgtgtagatacgaatggaggagaggacaaccaattgcattcgcaggagatgatatgtgtgcattaaacaatttggctgtttgtcatgatttcgatgacctttttgaactcatcagcctaaaagctaaggtggaaaggacagaaaccccaatgttttgtggatggagactaactccatatgggattgtgaaggagcctgaattagtctataatcgctttcaagtggccattgaagagggaaaggtcttggagtgtctggaaaattatgcaatcgaggtttcttatgcctacagtttaagtgagaggctgtatgaagttttgaaaagtgaaaggcaagttcagtatcatcaagctgtggttagatttatagtcacgcacattgacaaactcaaaacaaaagtgagggaccttttcttagaacaatcttccgacgaagatatctgatggcatccctgatcaatgtaagttcacttgtaaatagggtgaagttggatcaaagtataataggtagtgatgaaataaacaaactgtatggttccgatgcaccattggtgttcaaagatgaagttaaaatggttattcctgggaatgctgagggtgaggcaatcaaattgcaagcaaatattctgaccgctgacagattgcagtcaataagaaatgcaaaagtcaatggcaaagaagcggcttatctgcatttgggatttgttccaattgcaattagatctctattaccttctggaaatgaacagatctggggtagatgcgcactggtagatactagcagaactcgagccgaaacagctgttattgatgaatttgaattcaagttcacaaagaaacagccatttgctgcaaaactactaaccatcaacgctgcagtggatattaattgcaaagtgagtgtcggtagcattcaggtgctgctggagctccatggtgttgatctgagggaagaacgttctgtagcagcaatcatcactggcttaacatgcactcccaccaacaaaatggtgttgctgcataagatagagtgcgacacgcccaaatggtctttgtgcaatataatagagcaggttgaggatgaggaagaatccaagaaggcatttgaaaacatgtttaatgcatcttcttccaacttgatcgacttgggtcaagaacagtggctcgacgaaggtaagcgaacacctttgattggcagcttggcaattaaagggtttggacgcaaagtgatgcctgttcgcagacgaaacctcaccacgagaaatctcatgaaggattatgtgtctcatgttaagtcagagacggcttcactgaaaagaagtcaaagtggaagagattggggtaatgatagattgagaaaatatctagaagagcaggctctggagcaggccagatcatcgactgatcatcagttggttaaagcaccaaaatttaaaaccatcgaagtgactggtttggaaactgtgcatgatctaaaagataaaattgacaaggcagagtcttcaactgccagtgacactggaaccaagtgagtataacgtgtgactagtgtaaatagttagtacttatttgaattaatatagatagtgtacatccatgaaaatcaccaatgataatgccgcaactatcaactattggttagccatagttgaaccattcctcacatctgatgaggacagaaattctgatgacatcattcgaaaattcagagctgtagtggccgagcatggagacacagaggaggtggaccctgaggtcttcttcgccattttttccatcttggccacaaagtacggcagagtttattcaaaaaaagttgaagaattgaatgagtcactcaaagctgcaattttggctggggcagaagcagaagatctgagaaacaagttgaaagacatttcccaaagatatgcatcacagcttgagatcacagcagatagagagcagcagcttgaaagtttgaaaaaaaaagggcatgagcaaccactgaccggcagtggatcttctgaaccggtacatgctgaatcagcacacgctccacagttgcatgtggtgaatgatctgcaacaattctacataccattcaatgaatacccaagtctaactcagtcaataggtacttctgacattgcaaatgatgagcacctcaaaagagtgcaacttacgcttaagattacagacacgaaggtcttttcaagaactggatttgaatttgcgataagttgtggatcaagaagtacgtcagacaaggacccatatgatggtataatcaagatcagcggaaaaagtcatatgaggaaagatatagcatatgcaataagaacttcgggaatcactgtgaggcaattctgtgcagcctttgcgaatctatattggaatttcaatttggccagaaatactcctcctgaaaactggaggaagaaggggttcacagagggaacaaagtttgcagcttttgactttttctatgcagtaggtagcaatgcagcaattccaactgaagctgatgggagcgttagactgataaggcctccaacaaatgaagaaaatgaggctaactctgctatgaggtatgctgacatatacgagcaaaattcaaaaacagctggacatgtaacttcaagtccactgtacaatcgtgggagcagttatgagagcaaaaacaaagcaaaactcttagaaatgtagtcccgaattctggcatgggcggatgggtgggccaggactttacactcttaaagtataagtaaggggtaactcagccgcacgggtgaagattgtgcggagcctcatgaatctgaatccaagatgctaaaggggataccgcgatctgaggggtcatgggggttagcctgaagaacagaacactcattaagtatgtggtgacgcaggtcccgacaacccaaaaaggtgagctgaacctgatccaattggagcagtacaggtaaagttatatcctttctataaattgaaaggtagtttggacagatacatgtcattcaattggtgtggaacgttagtccaaatgaaacatttatgcttggatggaaagtcaagcaaacgttgtcaatgtgtacgtgaaattgtcaaataaacctcagcaatttctatgccctctttgtgctgagtattgtagagggtgaaggtgtgttttccattttatacgtcaataaaataaaatatgtattacttaaatacacatagggatgtcttttaagaacttttagac

SEQ ID NO: 501 - DNA, 6812 bp, Apple latent spherical virus
  source 1..6812: mol_type = other DNA
tccgttttagagcttgtgagttgttattacgttttgttgtttgaatctctgttttgttactctgatttccttcacgtttgcaccttacactctctaccgataaacattatcatcttttattttgaattttatttgaaaaatttttatattttcaatgtcaatcactactcctgtagtgattcgctttgggagttttgactcccctgctgcggcacagattgccgatactaaggaggaggaaactcctctctctcgccttgcagctttaaatcgcaaggctcaaattgctgctcgttcaagagtagcagctgctgcggcacagtatgccgaagagcaggagacactagttctcactgctcaatccatgagggatgctctccctttatggatgaggggtcttgttgcccccgctcccaaatccaaacgcgctctcaacgcgaggcgcgccgtaaggcgtgggaagcctctgaggaggctgcctgggttcgtgactacggtcgtgaacccacttcccctctctctgtttgggagggcactcctgagctccttgctatggagcatgcttaccttgccaagcaaggtgataagcgcatctgcgctcatttgcgcagacaggctctgcgggctgcctacaaagcccgatgtcaaaagagggcctttaaggtcttccaggaagaatgtgaattcttccgtctccctgtccacattgtggacaaaatccaaatcccagggcaggctagccccgtgccagagagcgtatctctgggtggcggtgttaaaaccgctacttctaagcgccaagtgaaaactcggcgctctttctcttctttcctcccaaaggaggaattttcctttgtgttgggcccttgcccaacatcttcccctgaggttactccaacctcaaccccttcaaccacccccccttcttctccacgggcatcttcgcccagaacccccttgcctcaggttaaagaggtgaccacacagggtattactctgtgttctcatgggcctgcttgtcaggaacatttttgttttggttttctagatctcaaagatgagtttcatgcttccacttatttaaagtggatgcttggaacccaactacctgggtctattttttgttttgacctccaagtttctagttatctagagcactgtacagatacaatggaggctattgatctgtggtggcatgttatggatcgttatgtgcgtaattacagagctaccaaatatgtcactaaagacaattacttaacaaaggctagcattgctattgatactgctcctaaagagtttatcaataagtgtaaattgttgaccaagcgtgcgaagcatcgaaatttgtcaaagaaagaatcttatcttcttaaaagaaatgaaagagattctaaatattgggatgcttttatagccttacgtactaatactaaagaaggtcaaggacctatagattgggtgaaggctggttatcgtaaatgtaaagaatactatgataacaccttctccaaatttgtaaatcaaattatgcaatcccttaatcctctaactatgatcctaggaccgtttaagtctgctttttgggaatgcgtttcaaatctcaaagataaatgtgttggtatgataaacgatcattggcttgcttttgcagcaggttcaacacttgttttgaccctcatatttctttttgcgatgatttgcatttgtaaagtttttgtatatttactatctactctaggtatagttgggtgtacagttacttttcttgtaacttctttaatagttattttctttttatttaatggttttctcgaacaagctgcagatattcaactttgtgagcttgttggagctgattttttaaattttttgaaccaaaatcaaaacatcgctcctattgctgccacaatggctgatattaaagaggaagctctcagagggcaagggttgcaatggtgttttacagctttgtataaattaatttctagattaattcctggtggagctaaggaagctgccatcatgtttaatagcgtaggtaatatcagtcgaagcgcaagtcatgccaaggatttctttgtaaatatgaaggaaatgactacttcttggattgacgccctctctgatgccctggctcttctaggagatgactctgtgactgctatgcacacattaaagcatctctgtgagaatgatttcttggaatgggctaagagagttgagcgctatgcaggtgatacatatgattctatgattttgaatcctgcagatcgacttaggataattagggaattagttgaccaacaagtgggctttcaaaaagccttctttaaccccagaatagcttcaaaggcacctagattgatgctcactgaatttcagcgcttatcaactatgttgagagattgccacagtgcactttctcgagctgccctctttgatatgcaaagagttcctcccttttggatacatttgtattcagagaatggcggcacaggaaagtccatggcaatgatgcctttgggtaattatttgttagattctattgaggaacctaagacccatagattcgttactaggaatgtagcctctcgatttttgaatggctaccttcaccaaccttgtttcctcatggacgagtttggtgcagctcctaagacggactatatggacgaagtcactatgttggatctcgtttctcctaaccctttaacgttgaacatggcagctcttggtgacaagaatatcatgttcacttcaaaattaattatttcaactgctaatcgtaggctagctcaccctgatgtaaaacttggggctaatttagatggctttctcagaagacgccacattttggctgaggtggtgttggctcaagggaagccatattttcatgaatttattcttttgaaagcgcgaactgagcagaaaatttatttggatcaagcattgcgagaagttgcaagccccatccatttaagtcctgctgaattttatgcagtttgcgctgagcaatttgtaaattttttaaatcaacaagggaatgctctcattgaacagcagggagtttcctatgttagatctgacgatttttcttttctcaaggattatttgcagtataagatgggtcttgattttcaacaatgtgaaatagagagaatagttactgattattctctctctattaaaaatcaaactatctttccagctgagcatgaacatattttctccagatggagggctgaattagaagcattatccttgtctgaactaattaccatgctcgataagcatgttaccgaaacttttgtatatactctaattaaagagaatcactcaaatgtggttatgtctaacctaacaccttacgagtgcttaatttattctttttgtaaagataagtataagaaagaaactgatgcaaccttctcttctcttcctgaagaggaagttaagcagccttggcttgcagaatttctttcatttacggcaaggctatgtctcaatgtgcccaaatgggtcacattggtcctagccttgtgtgctttttgccttgtaggttatgtactaattaaatttgctataggtttgtttacaggtgcttgtacaatttttagtgttttagctttttcctctttgtctgctcagggtcctgaggattctcctggattcgaaaacgctaggaaaactgctggggttaaggtgcatttcgttaaaacatccttccaaccttctgactggaaggggattaacgttaagccctctggatttaattggggggacgttgctgatgacgatgatgctatccctttgtggggtcaagggcctgatcagaatcaaaacgttctcaatcttttgaaacaccaagttgttttaatagcagagcattccaaggttgtatataatgctatagcccttggaaatagaaattttttgtttactaaacacgtttgggatctcatgccaacctgtaattatggtttattcgggtatgcgattgctaaaaataaaatatacattaatcctaatgttagaccagccattcaattaaaaaatagagatttggttgttgtacagttgcctgattctgttcctcccttctcagccttacctaaggatatttttctaagtaacttagctgaagcacctaaggttgctaacgctgctcttgttgtatcagagccattgtacgagaaacgttcagtggctcaactacaacaaaagatttacccttttgagaacctaccccaaattcatagtagagacacttactcttgtgggtctttgggctcaaagcctatgcctgcctgttattcttatacttttgatacttttgcgggcttatgcacttcacctcttatttctatggatggcggcaggtgcgttttactaggtttacatgtagctggagataaaagtaagatggggtatgcacagatagttaccctggaagacttctccgatattaacttttctgagaaggttggacaaggacccgagcaaatgtatataccaactgctcgatctgaatcctttggatcagtctgtcttcttgggaaatggactggccctaagccttattttttagagaatagttctttaactccctctctaattcatgactgtatagatatagacatgacaacggagcctgctattctttctaagaaagatcccagacttcaatacactaacaataaagattttgatccttttctctcaggtatgggaaagtatgctgttgaggctcactcctttgatgaagatgaagaattgtttgaggatgctctagatcgagttttctcagagatacctatgtttacctgtgaagatttatctaatgatcaggtatgcaatggtatagaggacgatgattatgctgaaggattggttatgcagactgctgaaggttaccccttctgcactatgcggcccccaggagtcacaggaaagacgtggctttttgcgggatcaccaggtgattggcacatagtccccaattctcttcttgctaacgaacttaatgtcaaagagttgaaccttagcaagaatatttttgaaccagtgataggtatagattttcccaaggatgagaaagttgattcttctaaagtgtacataaaacaaaaaactcgactttttactatcctacctgttgattataatattttagttaggaaatattttctttcttttgtttcacaacttatggccctccataatgaagttcctacaaaggtaggtattgatccaatttctaatgaatggtctattctttgtcattctcttcactcaaaaggaaccaattggttcaacggagattattccagatttgatggaataacacctcgtaatgtgcttcagggcattgtgaagagaatttcgcgtagatatgctaacaagagttcttttgctataacagatcctacactttctatcaatggtgatcttgctagatcccttttgatggatatgtgtagcactcgatatgggctaactaatggggacctttggtatgtcacttctggtataccttcaggatttcccttaaccgttatagttaattctttagttaattctttctttgtgcactttgcttatatgaagcttcattcttctgaagtgcacaaggctttgtatcctctttattcttttagaacccttgtatcatatgctgtttatggggatgataatctaatttctgtacatgacacaattaaagatacttttaatttagttactatatctaacttattgttggagcatggtgtgactcttaagaatggagccgataaaaatgaggaaattttatctccattctatcctatagagaaggtggattttctcaagagacgattcaccactttacaaggacatattgttgctccacttaacactgttaatataactgagcgcttgcactgggttcgtaagggcctaggtgatgctgatgccacacttgagaactgtaaatcagctctctttgaagctttatttcatggagagctgtattacaatgatcttcgaggcaaaattgaaaaagcttgtaaagtgaagggccttcctttgatagtcccagattaccaagacgctctttctttatttttaactggaggctcatatgctaaggctattcaggctatagcgatgaatctccctgatagaatctctctgtacaaatctgaattctatagtgtacaaatatatcctcaaattttttatgtgaccaatgagagaaatgtcacacttcagaaattgctggagaccactactctccgtaacatttgttatgtttctaggaactacgagtctaggagcagttctaggggtcttttcactcttaagggtgaaggttggactccagctgctttgaaagctcgtcttagtgtgtacaaagctatggccaaacctgtttacttcgtagatgaggctaatgatggtttggctatgttttattgcttagattatgcttttcgtgtttgtggtttaacccggagtcaaattgcaaaaattcttaatgcagtttttggtggtaaccccgaagtctgccaaagaattttccaatttttctctcaagtcgagccaaccaataagtacattcctcccaatcaaaggaggtaatttgtttggtctttcttccttcttttctttctttctttcttttgaactagtttgttctcgtgatccttggatccgttaaggtttcttgctggttcttccttaagatgagaacatgaaccagtctagttctttttgtttgctgtttattttatttcagtgtgtttgaaaagagtcggatagtccaatcc

SEQ ID NO: 502 - DNA, 8170 bp, Soybean latent spherical virus
  source 1..8170: mol_type = other DNA
tttaatatttgcaatgtctttccattgtccaagttctacttgccttggttacactcaatctttctctcgccgtgatatgcgagagcaaggggatcgttgtccccatgctatgtgtggtgctcttctagtgaagaaggtgcccactttatccccacagggtgccagacctgtggtatcaaagaccactgttgtggtccctcctcaagccactgaggaggttttgtattatgggtgtgcccccagacccgcttttcttgaagcggttttggcggccccaaaattaaagatggctccaccagtggtggatgcgatggaagtcgcatacctccgtggtgttgcagccatggaagctgaggagaagaaactcctcaggaaagaaaaggctgcagttgtggcccgtgctaaggcacggcgagctgcaaggaaggcagccaagaagcaagttgccgagatgaaggcaactgtggccctgaaattggccacaaggcaaaaaactgcacgtttgagtgcagctaagagggccatgaaggccaaaagaaaggcagccaaggaggctgccaggttggcgcttgaagagcgccgtgctgcgggtttaacccgcaaatcggccttcaggcgtagcctgaaaaagaaagccactaagatggctggtaggaaggtccctaagacctccacttccacctttcccaaggtggaatctttttcttgttttccttcttctcccctccctgcttttattagggaggaacagccctgggtggctgtgaataccccctgccctcatcctgagggcttcgatttggcggttgatcccgcctttgtggctcctattgtggggccaatcgttagtgtgccatttatggcacctgttgtgaaggcttttaatagccttgtagaaattttggcggctatcaattatgaggccgctgtagatttaagagcctacattttagaaatagcttcttacgaaaatttctttgctttacggagaatttttgttggaaaagctttatcttggatggctcttatcctacctctttatccctatgcgggcatctttgatacttatctcccacttgatatggtggaagataagaattgtgatgcttatttagcctcattacagcagactgcagtgatggtgctggaagtgacccagggaccaatggacgcacattctatctttgatatagtgcgttccgttggttctaaggttgctagcataaaggacaaggtagtgggatgtatagttgagaaatctgctgccctgttggacactgttatagacacagcaaagggcatgttttttggagttcttggcccataccttgcccgcgcacagaagatcggagaggaaattaaaaaattctgggataactgtgtcgagtgggcaacaaaattgtggcaaggagctcatatagcattacaagctcttggcatttatgctgtttgggctatagttgctatggtgcttgtaggagtaatgtatatattagaaacaattttgatttgtttaggtgtaatgagtggtcatggtgtccttgttgttgctttgacaggggcagtcatgacttttttaggttttactgtttttcagatggggcgtgagtatatacattttttgaccgccctacgtcaaatcattttcttagcagttattccccaaggaggattgactcaagttaatatcatggattcgtccgttgatgttactgagccacactccttgttagatactgctatggcaccagttcattttttggaaactgttgccagtggtttaacattcttttcttctacctctgttacagtcttaggtaaattaggaaattctctggagggaattcgcaaaggttttaattgcctacgcgattttacttccgttttgttagaacaatttggaaatgcttttgaatacatttccggtaagagaacgtctttcttccgtgatcttgcgtgtgcagttaaagtagatatcgctcgatggacccaggatgcacgggaaaccattgagtattttgaaatttcaggttcccttgataggtatgagtattatcgtgctcgtgagcttatctatcaaggtcaagatttgatcgacaccgccaacaaagctcgtagttcgcacacaagtgtaaaattcttgcgaactattggcaagttggttgaggaactaaaagaaattcgtgctaagtgtgcacgaagtttaaaattcccaggatggcgtcgacagcctttttgggtatattgttttggtgagagtcaatgtggcaaatctactttggcaaattatttgatgccattgttgatgtctcacatgggttgggatcctcaggatgtttacagcaaggatcccgttgatggttactggtccggatattatcagcagaagggtttaaagataaatgatttatctgctgttaattccaaagatgtagcgcccctcgagcagcagttgataccattgatatccactgaggagaaaatggtgtcttcggctgaaattgaaggaaaaggaatgcagtttgcctctgaaattgtagtttcttcatccaattttaatgatgcaccaactggtgctgaaattttggatgcagatgcttacagacagagacgaaaggttttgatgcgctgcagaagggctgctgagtgggttcataatgctgatggtacgcgcacagagaagcttgatgctgagggcaaaattgtatataagccctatgatccatccaatgctttatcttgtaccgaggtgcaatggattcatcctgtttcatttacagctcttcccggaccctgtgggcagtggcacttagccgagttcaccatacctatggtgaaggaggctatggatgcccactttttgcaagaagaaacaaagatggcatcctggaagtcgagccttggcatgaagagtcaaacagcaaggaaaatgggttcatacttgcaggatatgattaagggtattggtaattttgttacccttaaaggagcaaaagattcagatcctcgttatttgctggtagctgttgatggaaaatgctatgcgttagaccagcaagggaaagccactccttatgaggattgtgatgttgttgaagaaattgagcggctaactttgttgcaataccgctcttatttcgcggacttggtaatggaacatgctgacaatacatattatcaagattcattccattcatcaacagtccgagattttttgttggctctaatgaaagatgggtcaactgttttgtctgtggatagtctgggtagtagtactcaggacattcacaaagaattatgggcagaattgggactttcagaaaagatttttctgagggtttcacaaatagctcgtaatcaattgcgcgatgctccacattttaaggaagacgttgcgcacaattttttggaaactatgaggcatcttagggatgctattgtagatagaaaggaacaaattcttttattttttgcagcagtagctttagtgggcttgtttagttggggttttttgagcctaattaaacaatttgcttgtggttctttaggatttggtgctggcatcgcattgcgtgagcaaattgctcatagtagtgttatgtcttcaggtagtgtgactagtgcctttgttgcacgcaacatgccagttgtatggggcaaagctgctaggtatgccactgcacactcaagcaaagaagaagtgggcgccaattttgattattttgaagatgctagtgctcatttgttagctcgtgttgttggctcatctggtcagtctgagacctgccttttatttggtcatcaggctattgcactttgtgcgcaccagttgagattgtttcctgacaatgacagggtgactatccattatttttcaaaggagaggcgccctgtttgtttttcatttacttggcattatattaatgctattgagtggcctgactgtgaagtaattgtatatagagatgcacagctcacgccactccctgtatatagtgatgataattatttgtgtggggagcaaacattgcccacagttttaacgataactgggctctcaattaagaagaagaaattctttgatgattccacgttgtgcccaagcgaaaaaattctggacggtgaaatgcccatcgtccggagctggaaagataccgcttctctgagaacgcaagtccagacaattttgtccgagactcatagaagagatataaataggtattatacttctagttacccatcagggaaacatgatagtggaggtataataactgcagttataaatgggaagcgtaaagtgataggcatgcactgtgcgggggcgcaaaatgggaaaatttatgttagtaccattggtcttttgcccacccgcaacattaatgatgcacactctgctgccgattattttgttccaagtattggcagggaggaaaaaggattttgcaagattggttggattgcagatccttcaaagagaccacatgctgccactaagactgcattggcaccagttcctaaggaattggctttgccattgccagagggagtgtctgtaaagattccttctattttaagtgcagcagatccacgcctgcgtgatgaggtgaatcctgaatttaaggattatgatcctctacgcgtaggtatggataaatttgccaaccccatggatccgcttgatgatgaagttttacagcgggtctgtgaagatatttatgaaacctggtatgactgtttaccaatactagatgatgagaaggtcttcttgcaaaagacctccttggaggtggcgttgaacggtataccgggtgaggcttgctatgaagccatgaggttggatacatctgagggttatccttttgttttagaaaggaaaccaggggagagcggcaaactcagttatgtacatattgatgagaatggcgttcgttcccttattcctggtacatcggtttttagagattaccatgaattgtcagcaagtatactgacccaagtgcctgtgttgaattgcattgaatgtcctaaagatgagttgctaaaaccatctaaagttttggagaaaccaggcacacggcttttcgatgtactcccctttacacataatattcttttgagggagtattttttaaatttttgtgtttttctccaacaaaatagggtgcatttgccctgttctgttggtgttaatccatattctcgcgagtggacctggctttttgataggttggctgcgaagagtgataaagctttgaattgtgattatagtaaatttgatgggcttatatcacatcaagtctacatgcacatggttgcaaccattaaccgactctttagagatggtgaggaagcaaattgtgcgcgtaagaacttgtttttaatgtttacatcacgcaggagcatctgctatgatcaggtttatatggtcaaaggtggaatgccttctggatgcgcactcactgtaattattaattcaattttgaatgaaattttagtgcgctatgtctatagaataaccgtcccaatgccagccaaaaactattttaataaatacgttgaattggtggtatatggtgatgataatttaattgccatacatgatgatgtggtctctttttttgatgggcccattattaaggaaaaattggcagaggttggggtgaccattacggatggtactgataaatcatcacccaccttgttacgcaaaccgctggagtctcttgattttttgaagaggggctttaggaaaattgaagggggaatgtattcttgccctctggataaagggtccctttactcccggttatattacagtgctggaggtaaagggggcctttttcaacttgatatcctccacgataatgttaaatctttcttggaggaactgacgcatcatgctgatcattatgaagagtttcaaagagtgcgcagtttttatattaagcgtattccttcatggtcagctacgctgcctacctatgctacatgtctgaatatgatggaggggcagcggaattcagcaacaccctggcaaccacataaatttatagaaacgcggccttcaggttgcgaaactaaaatgatggcgggccaggataatcatgctcagaagatatgtgtaactgagcgtataattatatgtggtgaaaaatatacgccaccaatactggagacctcttttgttgtttcaatagacaaccccctttatattggtgaaaggggggagtatgttaaaacagagtttggttcaggtatggggcgactgcctactgatgcctggatcaaagctttctccagtcccaagaagcacccacagctttttgaagcttataagatgggtgctactatatattttagatcctgcatgccctatttaaatgcatggtgtgcagtgtgtaagtttgcattggctcatggaatcgatcagagttctattattgctatgtatgagtcatgcaaaccaagaggggcgggcgacattgctcctcttgtggccgtaaaggcatacactaaatttgtgaacagaccagtgtttaaatttaaagagactgttcataaggaagtgctcgaagcacacaatagtgtgcgagtcgcctaaaatgagggcgcttcctttctttactagtttctttgtaaaagtaaactagtccttgggggcaggtagctccctccagcagcttggcacttgattagctttaatagtgttagctacccttcagcaaggtaggagctgcggtcgtattcgaaccgttcccgtggaactactcggggttggaagcaatggcgtatagacgctggtgtcatagttcttaaatcttatatgacactagagaggagagccatccctcttgaagcatgcaataaacaaggttgcaccatgaaactagccagcacattgaaaaatgtggcttaagggcttaataccttcgggcgttttggtggacctaacgttatgcgtgattgctgatggtactaatgtactcatgttttccattacatgataaaaggtggattcccttttcagctatgggttatggaatgatcaactcatgcaccagagtgtactaggttagtgtacaaccctctttttgctacctttttctttgcatgaataaaggagatagttcctgtgaaattcaggttcattatcatttactgctttaatttacttttatccctcatctgagtgagacagatggtacgggttgttaataaaagtgtttgggatgcactgtctgatccctcgctgctggagcgatctgagtccagccgcatttgctgcttttagatataagcagatggaggactagcactccccttgagaacaaaatcgagtgcggcctagtcgtctaggatttccttagctataggtgatcgtgggctaatgcataccacagaaacatgcttcgtctttgagctaagtgtgaccgtgatggacacttgcctgtgttctttagcacagtgtgatttccttttagtaggtgatgatgaatgtagttttgaaactatcaccgaggtctgggaatataagcgttttggcaaacgatattgccttaatctgtgtacgacacaattgatagtgtactcaagagagtagggtctggcagcctgaatcttggatgaggtcccgagatgaaaacgggggggtaattaaccccagctatcggtacacggagatttccacgtttatgtaaatgtggcgcatttgctgtttttagatataaacagatattgcaggtagaaaacctgtgtggatacctattcttggagaaggagttcgctcggaagagtactatcttgaaacatttcaaaaggaaatttcattttaaggagagtaggtaagccattatacacctgtgaggagggtacaagataaagctactgctaaatttaatgctactggaagtgattcccagggctacatgcggtgccattgtacttatacctgaagggtgagtttggaaactcctacctattgaaatggtgagaagtgtttatttagtaagctcctaatcattatagggtgacgttgttttcgcaattttgttggtctttaatccttttcaaaattgcttttgcattttaatttatgtacgactcggggaaaagaaccactgtgtgtgtgtttggattcccaatgggtagactataccaatgttagtccccc

SEQ ID NO: 503 - DNA, 76 bp, Spinach latent virus
  source 1..76: mol_type = other DNA
gtggtattgtgcattattattttaacgcacaacccggattaatcaggttttctgagtatatacccgttagtactca

SEQ ID NO: 504 - DNA, 71 bp, Spinach latent virus
  source 1..71: mol_type = other DNA
gtattgtgcagtattattttacgcacgacccggattaatcatttttgtgagaatatacccgatagctctca

SEQ ID NO: 505 - DNA, 113 bp, Olive latent virus 2
  source 1..113: mol_type = other DNA
gatatttcgcactcctagtgaatcttcctagtatatccgttgaaaaaacgagagtgcaacaacaaaaactacagagttctttttttttaaaaaaaaaaaaaaatcaaagagac

SEQ ID NO: 506 - DNA, 80 bp, Citrus yellow vein clearing virus
  source 1..80: mol_type = other DNA
gaaaagcaaacattatcatacacaccccaaaaattgtgatcatcgtctctgcatcaacagctcagctaagaaccagagaa

SEQ ID NO: 507 - DNA, 74 bp, Potato latent virus
  source 1..74: mol_type = other DNA
tcggataaaccaaaccaacaatatttacacatactcaagttaaacatacactgttcaatcttgcgtacgttatt

SEQ ID NO: 508 - DNA, 35 bp, Apple stem grooving virus
  source 1..35: mol_type = other DNA
aaatttaacaggcttaatttccgcgctttacgtca

SEQ ID NO: 509 - DNA, 73 bp, Citrus leaf blotch virus
  source 1..73: mol_type = other DNA
gaaaagcaacgaaagcaacctacacaacccaaaattaatatattgcaataactgttatcactcaatataagcc

SEQ ID NO: 510 - DNA, 384 bp, Apple latent spherical virus
  source 1..384: mol_type = other DNA
tccgttttagagcttgtgagttgttattacgttttgttgtttgaatctctgttttgttactctgatttccttcacgtttgcaccttacactctctaccgataaacattatcatcttttattttgaattttatttgaaaaatttttatattttcaatgtcaatcactactcctgtagtgattcgctttgggagttttgactcccctgctgcggcacagattgccgatactaaggaggaggaaactcctctctctcgccttgcagctttaaatcgcaaggctcaaattgctgctcgttcaagagtagcagctgctgcggcacagtatgccgaagagcaggagacactagttctcactgctcaatccatgagggatgctctcccttt

SEQ ID NO: 511 - DNA, 13 bp, Soybean latent spherical virus
  source 1..13: mol_type = other DNA
tttaatatttgca

SEQ ID NO: 512 - DNA, 192 bp, Spinach latent virus
  source 1..192: mol_type = other DNA
tgttttatttataaaacctggttaagggtcctccgggatgtgctcagcacctagcctaagccaagtccatatgcccacctatgctgctccgggtggatgcttatacatgctatggatgcctacatttgaaataatgtagatgcctaatactctctctcagggagagagtttagatgcctccaaaggagatgc

SEQ ID NO: 513 - DNA, 194 bp, Spinach latent virus
  source 1..194: mol_type = other DNA
tgtgttcctttcatggaacctagtgaggggccctccggggtgtgctcagcacctagcctaagctaagtccatatgcccacctacgctgctccgggtggatgcttatacatgctatggatgcctacatttgaaataatgtagatgcctaatactctctctcagggagagagtttagatgcctccaaaggagatgc

SEQ ID NO: 514 - DNA, 258 bp, Olive latent virus 2
  source 1..258: mol_type = other DNA
tggtggctcgcctagagcggtgtgctggtttctacctaaggaaccaggagagtggagtgacttggtcatgacaagtcgagtagtactttaactacgagtcgtcgttgagacgccggtccccttccaaggggatcgagagggttttcccggtactttacccgggattcgaattgagctgtctttgacagagctcaaactcctcgctagatactctaacgagtgtcttgaggactctcctatggagagtcagtaaagacc

SEQ ID NO: 515 - DNA, 36 bp, Citrus yellow vein clearing virus
  source 1..36: mol_type = other DNA
aacataaatattcaggctttcagtttccattttctg

SEQ ID NO: 516 - DNA, 76 bp, Potato latent virus
  source 1..76: mol_type = other DNA
ttgagttgtgcataaaacctaattaattttaagtgtgcaactataaaataaataaagttttaaatatttttccttt

SEQ ID NO: 517 - DNA, 142 bp, Apple stem grooving virus
  source 1..142: mol_type = other DNA
gagtcgtgtgaaattccgcaaacttggtcgcggtcttgcaggttgacatgcctgcctttatacttaattaaagggttcccccggttttctgagcatttccgggttagtgtggtttttctagagtctagagtttgtccactct

SEQ ID NO: 518 - DNA, 541 bp, Citrus leaf blotch virus
  source 1..541: mol_type = other DNA
tcccgaattctggcatgggcggatgggtgggccaggactttacactcttaaagtataagtaaggggtaactcagccgcacgggtgaagattgtgcggagcctcatgaatctgaatccaagatgctaaaggggataccgcgatctgaggggtcatgggggttagcctgaagaacagaacactcattaagtatgtggtgacgcaggtcccgacaacccaaaaaggtgagctgaacctgatccaattggagcagtacaggtaaagttatatcctttctataaattgaaaggtagtttggacagatacatgtcattcaattggtgtggaacgttagtccaaatgaaacatttatgcttggatggaaagtcaagcaaacgttgtcaatgtgtacgtgaaattgtcaaataaacctcagcaatttctatgccctctttgtgctgagtattgtagagggtgaaggtgtgttttccattttatacgtcaataaaataaaatatgtattacttaaatacacatagggatgtcttttaagaacttttagac

SEQ ID NO: 519 - DNA, 191 bp, Apple latent spherical virus
  source 1..191: mol_type = other DNA
taatttgtttggtctttcttccttcttttctttctttctttcttttgaactagtttgttctcgtgatccttggatccgttaaggtttcttgctggttcttccttaagatgagaacatgaaccagtctagttctttttgtttgctgtttattttatttcagtgtgtttgaaaagagtcggatagtccaatcc

SEQ ID NO: 520 - DNA, 1569 bp, Soybean latent spherical virus
  source 1..1569: mol_type = other DNA
aatgagggcgcttcctttctttactagtttctttgtaaaagtaaactagtccttgggggcaggtagctccctccagcagcttggcacttgattagctttaatagtgttagctacccttcagcaaggtaggagctgcggtcgtattcgaaccgttcccgtggaactactcggggttggaagcaatggcgtatagacgctggtgtcatagttcttaaatcttatatgacactagagaggagagccatccctcttgaagcatgcaataaacaaggttgcaccatgaaactagccagcacattgaaaaatgtggcttaagggcttaataccttcgggcgttttggtggacctaacgttatgcgtgattgctgatggtactaatgtactcatgttttccattacatgataaaaggtggattcccttttcagctatgggttatggaatgatcaactcatgcaccagagtgtactaggttagtgtacaaccctctttttgctacctttttctttgcatgaataaaggagatagttcctgtgaaattcaggttcattatcatttactgctttaatttacttttatccctcatctgagtgagacagatggtacgggttgttaataaaagtgtttgggatgcactgtctgatccctcgctgctggagcgatctgagtccagccgcatttgctgcttttagatataagcagatggaggactagcactccccttgagaacaaaatcgagtgcggcctagtcgtctaggatttccttagctataggtgatcgtgggctaatgcataccacagaaacatgcttcgtctttgagctaagtgtgaccgtgatggacacttgcctgtgttctttagcacagtgtgatttccttttagtaggtgatgatgaatgtagttttgaaactatcaccgaggtctgggaatataagcgttttggcaaacgatattgccttaatctgtgtacgacacaattgatagtgtactcaagagagtagggtctggcagcctgaatcttggatgaggtcccgagatgaaaacgggggggtaattaaccccagctatcggtacacggagatttccacgtttatgtaaatgtggcgcatttgctgtttttagatataaacagatattgcaggtagaaaacctgtgtggatacctattcttggagaaggagttcgctcggaagagtactatcttgaaacatttcaaaaggaaatttcattttaaggagagtaggtaagccattatacacctgtgaggagggtacaagataaagctactgctaaatttaatgctactggaagtgattcccagggctacatgcggtgccattgtacttatacctgaagggtgagtttggaaactcctacctattgaaatggtgagaagtgtttatttagtaagctcctaatcattatagggtgacgttgttttcgcaattttgttggtctttaatccttttcaaaattgcttttgcattttaatttatgtacgactcggggaaaagaaccactgtgtgtgtgtttggattcccaatgggtagactataccaatgttagtccccc

SEQ ID NO: 521 - protein, 3582 aa, Citrus tristeza virus
MSKLRGSFWSSAIAVNSDYTISRIWRKLNTIVVLHYFGFVRITKVIRDKSADMPIVPLRKSVFPFSVRAAVTSFVLLGVLLTLRIQGASVAFPLSTHLALFVPALFAGFSRFSLCKPPLTSAAKRSLRQAKRESVSLSSRASSRFSREVPRGTRSRLHRRVVRRADTAPVESPQDKPTRRNSRLGKTSHLPYVGEAALDDILRWIEEVNPHPSMVAIPVPITFGTMPATAWCSHSEAAVLRAALTITRLKLISPLRRNTYGTSIMTYLLPLTVPVRFLPASASIFPSKSKLGVEVPSGRDLHTAFVRSSHASAFFSDAVRASFVPSSAEQFFHFRRQRTHVLAITDPVLCGTVSVLMSDGVNTARLDVVAPAYYAYAESLGARVRFLWESSDVDDAKVRDGQCYVRHVFDVALYFGRRADLSVRRALGMYPTVGALKAYLVREYGRDSLKVPMRGTYTFGSVFHCLSLNLQVDLRSIPNHHLVGGTSAHVLIGQVRVSVPGSIVKPSRSAVRRRNRRMRRDGFLGSSGSSSSAGESTRCSDCSSPRGLPSPSVLKPSLGRIPSIDRRFRFPAGTQLRVSVPRRVDDHVYVSTGSNFDELCHAVLTRMSKGTTLEILLHSIRERKGLLGFAACFRWGSSHVFVKRGNFTARFPISAVRYENQYAAVMMDVGTSWVPKGYVPDVDVVKRRRSRNRRFPLSHRAVDQSVPALQSSPVEVASVSSDKPSSSQKASSPSTSSSSSFNSTRSSDWVNVGFSHRTTNKVREPRYAGHRRIGNFTFPRGTVYNTPVDERAYKRVLRLRDTTACSFLRILLARLSGYRPLSDEFFNKCVTSRFVACIEPVESGLVKVHFRSDVFRASFPFDGQPIHPATALTLEVVVSWDWMVTAFQNPLKDGYCYIRHFAEVSLSMGRIFFRRDVDLGPFPYVFEVQHRLERLYGKAALRYGVRGQYSAPRCFHCCYNDSPRPMASFNGYHKMGGEDNSLIITDTDRLRAVGSAYEKVKRNIPDSLLVRSVEKDLIEFNQTLVDMHRSRPGVVVPFQMSENQQVMLTRAYPEFNINFIHSVHSDHPVAAGSRALENHLVRKHAGTDYSDVGGCPLFHLRAGHSGVHVCRPVYDVKDAHRRVVRHHQLSKVSLDQSDGVKQVGWTVNTNSVCGNILGECYHASEAMVMVQVYDVPLRELCRAMINKKTSVCYMTMVTPGELLDARESFFIKDLDCSVELDPIADRVVYCFNNSAYTHTYSTICECMRTPCLVVDGFLFTIEMVSLRCSVNYYCITKSSVCPRISETKRLRYRRCDSDLIRIKIPRYSSKTRSCLPGCYYLYLDAKFVSRVYEYVVNNCVVVNAKTFEWTWNYIKSCKSRVVISGKIIHRDEPIALEYLDGFSAVMLSAGVKGRQNADVSRRLAAFSGETSIFELVGFAISEKCRDLFLGIQDAVERCVKSYLRNSFNMSFVDLSDPLLTISEYSELDVPIDLPGFGGIVDGNETRLMEDGVKSALLRKAVQAEAQLSLKRGNTSEIVPCDDDDDSNGDDSRVSLDTDWWFVLRGGSSGGLRAGAAPSLFRCLLRKLGGGLCLAKKVLELLVKRVVESFSRLKRKTARLTSFANLLLARLSCGFFDDTVFSAVWEIAINLTRIVDGVVKTKLGCFRNLFRLIPKLYAGCKDVVKDVSNAYRSVVSFSAEVLGKSYSKLCQFCLEIFDIGLIEVSARNLGLETCVSIALAIFDVLITFPLGSVSFPVVCARVFGRLAMEVGSNFLFKKVFGKPETLGEDTFRRTVSMVLRPKAFDKLSVDAKGLVRCSGVIPGVLRIILSSLFSEDDAWVGYSKHEVSSLPIVTFCVKRLSYSLERCKEACVAFIVDSAKKILKSLTSEFNESIQNSDLTSGAKSLYGHVSSILYTSSGVINKAGSAVATVKAVGSDISGRVKRMRPRFSLSRHFDEQTSEYYSASDCSELDESLFSETPGLRGNARCRDLFRIVSRRAVACCEYVTILLKRLASRAGEYSYSYVMDTLVRLYVATDDVVRRCRSFTFDCTDKASNFVTGFLSWRSLRSGAYSATPGLGGGSRGLTSFSHTGGFTRVIGALGNTLSVVFDEEFFRTLLHRLRADVVVLLVEFLKNLPVCLFSIYTFIECRGRIFPLREFLWGFCRFVWDVIEGLSINTYQYLSAVAEKVYRGAFNRRFNEEDERTLRVITEAEGRIEFLRVVLAEMERFRAASNEVSSSRSSDSPSFPPTYGEIEELNDDSSDSALVIGVDNGTGRTIVDGETDSASGSDSDVSIPLDRDFEQIGRLGGNGNVDVVRLGLKFVLKLLRNLFDARSFKVLYGLLLQTLFYGGSVNKFVCRLVFSLGTCLPFELLRFACSARRLLKSLASFVYQTNLFSEVMVEHLFSVSRLLYDSRYFATVFSELERLNFYLDYFLSLPKRYLFPNSRARSCARVPVPVIRTEGVAPVRERSLNDILDSLDSLKVSDLKGKSTFVDDGESDSGSEHSGSSISFGSVNEEVLNAVNGDSVCEKAPLMKHVTALSRLERHPSGRKDIPVSRKTFVRGESSGVKSKVSMCDYLVTLNSSFGTVPDMYPVARDITYKKLTNAMREFYYSQKITLYELHGKLSSYWDELKVAGFDRKLTRMDLDDDVYVVDFNRKLLVGRNGSHPFRNTLKSYCFMFCNDGLVPCPRSQKYDYALISNQTSFVAANSFLRAVDGKDLTFTNEEHSLIVYEAPPGGGKTHSLVNSYADYCVKVSCLVVTANKNSQTEISQRISNELMGRKLAAKYVTDAASRVFTVDSYLMNHLRLTTQLLFIDECFMVHAGAIGAVVEFTSCKAVVFFGDSKQIHYIHRNDLGVSFVADIDAFIQPEHRIYGEVSYRCPWDICEWLSEFYPRHVATANVGSIGKSSVSIEEINGCDDVPYDKAAKYIVYTQAEKNDLQKHLGRLTVGRNKVVPIVNTVHEVQGETYKRVRLVRFKYQEDTPFSSKNHIVVALTRHVDSLVYSVLTSRRYDDTATNIDRAKEIFDKFRSSNHSYGSSSLEWYLEKYPTEYKGSKASSAPISCINEFLNEVVVGSSVVQLGDVSEELSSRPFESGCDNVTVETPPLLTRVTYTNRLAFGVVRSQAIPPRKASLQENLLSYESRNYNFIKTERFVGPSEFGRAMAAAVIERCFKMEEMAKIRCDIISLTEANILKWLDKRTPCQIKAVHGELKLPFSVEEQISNFKLMVKRDAKVKLDDSSLSKHPAAQNIMFHKKFINAIFSPCFDEFKNRVLSSLNDNIVFFTEMTNAGLAEIIRRIIGDDDNLFVGEVDFSKFDKSQDLFIKEYERTLYSEFGFDTELLDVWMEGEYRARATTLDGQLSFSVDGQRRSGGSNTWIGNSLVTLGILSLYYDVSKFDLLLVSGDDSLIYSSEKISNFSSEICLETGFETKFMSPSVPYFCSKFVVQTGNKTCFVPDPYKLLVKLGAPQNKLTDVELFELFTSFKDMTQDFGDQVVLEKLKLLVEAKYGFASGTTMPALCAIHCVRSNFLSFERLFPFIRGWYVVDALKLRQLRKLTNLICERVVYDNRVSYFSYFDNPFTKPDANDDNVDDLGQAGELATG

SEQ ID NO: 522 - protein, 1056 aa, Spinach latent virus
MDTIVQMKVLCYESMILLMIPSDVNAPRPETAIGRLISDAAVSGVLRQCDFTAAEASQCFVPIITGRSECIETRFSGREIQFRNFSYSSQSFAAAHRVCEADYIYSRFQTRNTTIIDIGGNFCTHSKMGRDNVHSCCPILDVRDGARYTDRFMSVAGALETQPDRELRLNYCSNKFEDCDVSAPWAMAIHSISDIPITSVVKHCFRRGVKKLIASVMMDPMMLVASQGFMPRLNVQWEIEPDEENKGSRRISFHFVDAPGLSYTHNYDVLMQYMTCNQVIISGKAAYRVERVADLSGVFIVEINPGGNCWNERLDLVPMRDVSCAWMTSLKRKTLVRVAIPQYIHSWEVKYVIADTDFVRRVAEVSFRQYKPETPLQDLVKSVATMISSASNHCIINGVTMQTGTPLAIEDYVPMAVTFVAFAKSRYDSIKEGMKMVRQRGTNIADPNDHYDYEKDGSDVKSFSNHIIPMKNTIKSLFFPMKVKMNDNSMLIYSQGILSTVVDEIKTLFGWDVWDTDDAVIQSLPSFYKMEDVFQVTSDHYCLSHTLSVDWWLEGLYDSYHDMRVAHKKKLDEEESRKTKVENALLKIAEVLEKPDVSDGLKALSELPIISSLLEKKSEEIVTKPQCRDTEKPHINPYADAIKEAQAYYEELEVVNTRNLRGVGDYLFWRKKSNYASVWGADESRVVLEPMARKFYSRDRNVSIPEYERGMTVDGFVSIKWVDGNITEDTWKCLSKYAVVLLDSSCVFDAGSRIMPGLKKALVMDANFKIVIEDGVAGCGKTTSLLKQAKPDSDLLLAANRETANDAKASGVIPKALEYRVRTVDSYLMLRTWFTAERLLVDECFLVHAGLVYAAATLARVKEVIAFGDTKQIPFVSRIPTVKLRHASVVGTLKPRTITYRCPRDVTAVLSEKFYGTKVKTFNLVKQSLELKNIDSSTEIPVEKDTLYIAHTQADKHALMRLPGMNGIEVLTTHEAQGKTRDHVILVRLSKTTNLLYSGKMPDAGGSHNLVGLSRHKKSLRYFSVFADDPDDQIATGIRWSKTLDEQELAAYRAAG

SEQ ID NO: 523 - protein, 797 aa, Spinach latent virus
MDSYHFLSQLCDLNVLTHALYVNQVFEIVDQSTTSYMQMWLYSRVIVPVLKYHLSGDIILDKLHDVFLGTFRSMMVPMIMLNRLSFVVKMTTMNHHRKAYLPLEEREKIHAATFLGHDHWASVTSGSSFYDDLEILADETVNDDLHFDKESSMPDEYQIMWNDGTIDSVWSSQFECEEPPKPKFIPRPSDKVCDPVVIQDAVNDIFPFHHEMDDRYFQTLVETQDISLEVSKCWIDASNFRDFVKGPNSYVEPVFQTGATSKRVHTQREALLAVKKRNMNIPELQSTFDLDAEVNTCFKRFLTHVVDLPRLKRLQPMTGVEVEYFNQYLLGKNPPVKEYQGPLTLTALDKYMHMVKTIVKPVEDNSLKHERPLCATITYHKKGIVMQASPRFLSAMSRLVYVLKSKIHIPSGKWHQLFTLDAGKSDAVKWFKEVDFSKFDKSQGELHHKVQEKIFNALKLPPGFVEMWFSAHERSHIVDREAGIGFSVDYQRRTGDANTYLGNTLVTLICLARVYDLCNPNITFVIASGDDSLIGSVEELPRGPGEFIYNPVNFEAKFPHNQPFIWLKVLVSVDLEDGGREVIAVPNPAKLLIGMGRRDCQYQALDDLYQSWLDVIYYFRDARVCEKVADLCAYRQTRRSSMYLLSALLSLPSCFANKKKFKWLCYRLREQGCLKKDIYPVAKPISAHNIRKEDSNGCDVNQGTDDSFSRKKNRGCWEYVPKMLQTDVSVPVTDKSFHSNRGSSVSPTDCGDGGCSRSASSIGSKNTKPRHRFRAAGVHQPSGRDPDRIPPNHRRSA

SEQ ID NO: 524 - protein, 787 aa, Olive latent virus 2
MAGVLYDEEYVPQEPDYLYCPYEWEGEDPTQCDANVPSVSYLVEAVKKSFTEGNHDMLISCESYHAECCEGPLMNKGLTLSTYFMSYPGISLPAFGGGVIHVTSARVCMQAFYAVTPGRCSCSCGTQFIYRAKGGTGLTFDATNTISSAFKFEDGKVKWLTEDLGLALLAGCFLKYVPIPHEIEIKIERKVEPVSALDFWEPEGLISDVHFVHPQERALAPEPPMDVEMVRLVRTELFEHFNPTLLLNARSDFSGEKLKEVELPRAQSEPLVPRVCLPRGDDALIDQFFIDKAPEHFNREPATDQWQVESDDFTVDFPTQVRLRERDEDWFRRKPDFAVSSIRTGLEMPRIATKKEMLMAFSKRNVGAPQMVEVPQEIHVKRLADRFFRTFLKEGGWDKGDGHYWDDFFHRKGRKVFSLENCYDDPLSSYLVMLKSAGKFSLDLNFPVRSVPQTITYHEKWVTEVFSPMFLQVMARFFSRLQDWVVVPAGPMADFSRVWPSFEGKCLTEIDLSKFDKSQGKLLHDVQREIFLRLGFPPIWCDWWFKFHESSYLNDKNLGIAFSVDYQRRTGNTATYFGNTLVTMIMMAEVYELDSLPFCGLFSGDDNLIVTDRPLEGRVSLFPNMFNMEAKVMRPGQNYMCSKYLCTVDGRVTPVPDPFKLLKKAGASCPLEHLDDFYESFLDYTKYLVRDEVRTLIPRLMAHRYQVSMDEAGVALDQIMSWRKSKTQFFKHFQYRKPIKDSLEAVKSDFLSAFGKVDDRIRVWRGRRTNHKKEVDALKVPLVSFRE

SEQ ID NO: 525 - protein, 1649 aa, Citrus yellow vein clearing virus
MATIRGAIERITDTTVRTTLQEEACRQIRAELKNVEHINRYAIQPDAADALEHLGIGSNPFSVALHTHGACKAIENQLLYVVGTLLPKERVTMLFLKKSKLNIMKRCPKFQDIFLNQHIEPRDVSRYCDFNVQSTSTSIPTRTAYISDTLHFMDRRDLVRLFLNSPNLETLYATIVLPVEAAYKQPSRYPEIYQINYDFDGFQYIPGGHGGGAYHHEFEQLQWLDTGHIHWRGPDCKEIRMTITAQMLESLGANHLFCFKRGKLLTPRVRTFGRDTQVLLPKIFRPADKNFNRAIPLTLANKLLLYAKSINTVTFRDVVAKTRQLMKDKELETYTGNDLLHMANYFFAVGALSGVNSYDQLLGLSAWEACTVRIKNTITNLWEKIAGKKEFGKLLEALEWETFTYSRQVTEFTVTGLPALLPLPDISDQEEIFAQQDELDKITAGATKIRTIDIMRGQANRANPKTPINSTPAQGPQLPDTPDPIDQAASKDLVTKLQKNKRIYIQDDGPEYLMGHMAEVPAWYLEQDDTTTRLKNRCAWFFGPPTYRYGHNDIEYTTIEYYPWVERIGAIFGKYNTCLAQTYDAGARIGYHADDEDCYDPDVTVVTINLTGNATFLLKTPTGTRTWKLKPGDFIIMKPGAQRCTKHAIRDCTTNRTSLTFRWQARTCPTNLRKITNLPKATNQPQTTEWRPVTKPRPSTTASSDTQTPLVIDQERGYTTTSDVTPTIRLPAENGNNTGAGPSSALTLADLNDNQAPTTNKGKEKLEEMVETGPTIMERFLNTVQEPTQDLWDSASESAASYLAEGLGISAIQALPWAPHLELINALGFQGTERQYGPDNCLIWPITHYRELPRSNNVEAPPEVLELLDCINRYPTDVPMLKTRAAAFGSDVKNLRIGALVKNQDKQWRASLALLCEENEHLLPTTVIHGAGGSGKSHLLQQWVASTERGNVVTILPTIELLRDWQNKCPHAPKETFKTFEKALIQNSAPVVIMDDYSKLPPGYIEAYVSLKGQCKLLILTGDPRQSHYHEENPEALISTLDPATDYFGKFCAYNINATHRNAKTFANALGVYSEKEIPTTITCSSYQKSGWPTLVPSILKRTALNDMGQRSLTYAGCQGLTTPKVQIVLDNATPLCSDKVMYTALSRAVDQIHFFNTGPNHTDYWEKMNATPFLKTFIDHTREETFAEHQPAEPTVREYAPATHFPPANENLALEPWVEPLTDKHSRELFHSALGHSNCVQTENTVVQLFPHQQAKDETLFWKTIDARIKITTPEENIRACSIATDIGDILFLNYKEAMGLPQDPIPFEQALWDSCQAEVQLTYLSKPLAALANAAQRQDPDFDSNKIQLFLKSQWVKKVEKMGCLRIKPGQTIASFMQQTVMLYGTMARYMRRIRTSLCPPEIMINCETNPNQIGTWVREYWNFNTQSHENDFEAFDQSQDANMLQFELIKAKYHSIPEEIIAGYRHLKCNAHIFLGTISIMRLSGEGPTFDANTECSIAYNHTRYFVPKGTAQLYAGDDSACASPLSEKPSFQHISPELSLKSKAKIRTQQKGDFATFCGWLITPKGLIKNPTQLYASWLLAKHNKDLADVARNYALDLRIAYQLKDELYELLSPEELDHHQLLVREMIKHKMGHLLNLPEGFKTN

SEQ ID NO: 526 - protein, 1780 aa, Potato latent virus
MALTYRSPLEDIVGAFEPSVQTAIANTAANHYKQLEEEKGILFNYALPPEAKQRLIGAGIYLSPFSAVPHSHPVCKILENHLLYVELPSRLDNSFMFVGIKNFKLDLLKRRHANLSMIQTINRYVCSLDKIRYGSNFVVRSSASYPELCRRKGELDGAVLRELVPELMIKSAKNLFLHDELHYWTHRDLITFLEVLKPDKLLGTLVYPPELLKGAKKSLNSWCYTYRVDKDKLFFYPDGVHSEGYEQPLSGGYLLETSRITTRDGEVYCVDVVCSKFAHHLIAITRGDLIVPTQRSFAPFEAITSKGLNNLVRGKVECFPVCASVVSKLYRYLRTLKKPDEQSAMAKLSQLQANPTGEEIHFIQGFAKLVINTNKIDSLINCDSIKVFMGKLFGPLPNWLTKRLRSVQEVSLDEFVHYFEPYVVNVPTKHVNYGFEFNYVMEDFRYEQGENDLVDMLDNFDGSTKMSTSLCMMTPYVGLAPLTTRRKFLCHIEENSIFRVVSRNIFCSYTNSYKVAVSTEGVVRILEIYSKVSVDLLGAYLGKLLKKTEFIERVRSRVKAIAIKHLKYTWQQVGLAWFTSGRRGYTKYIDCSPYTMNTFKELKERWGVIVRELSKQQDNAEAAKNIPEQEIQTTSKPSCVEKRNYFSNTLMTSFAASGVKGKEQVSSEIAKGRGERSELRATKLMGSCSTLGKVAHIASRKGSMGVLECVARVIKLDFQTALKFLRVKGVWMQEYESIGELEEEQIQSPAYDFCAAIAMTFNVEIELTFPGSELVYHFAASSTVSCIRLSIWEGVVTLMRAENDCVITACAQALAREPEDVVKVLKDRLEESILEEIWNGEGVPFERMYLFFEALDIQAHCNRDGAQLVLNGGGKLARCFVIKEDHIEFAGEKKVSRVLELQDARTSSKADPELVKEFQKAGTVVEYVAVQSRAQVLAKSLVDATTGVCSSTIFNDCESLERSFRFTESELARNVCCVIGTFGAGKSTLFKDMMRQCLGKGVHYASPRKVLANELKASLGLAKGKRNRKVGTENWNVHTFESFLKKAKNVAEGELVIIDEIQLYPPGYLDLLLYLIPEFTSVFAVGDPCQSDYDNEKDRHVFLGVETDVCRLLSGREYEFNVLSRRFHNLGFESRLPCRFKFPAGAVKEEYLFVNSMTEANELDSAYKSVYLVSSHLEKKIVEYQSDVKTPNVLTFGESTGCTFKYGCILITQVSSACSERRWITALSRFSHNLCFINATGVPIENVAKSYKDRSLGKFLCGTAVEGDIKSMAYGTPIFKEQFIAGVGRDEGVKEDKVTGDPWLKTMLDLMQLPDVEEAEMMQEEMQEEWFKTHLPQEEIEGVRCRWIHKMLAKEARECRMGSIVSDQFPDDHSKQEGKQITNAAERFEAIYPRHRANDTVTFIMAVKKRLRFSRPSVEKAKLTQAECYGTYLLKNFLDVIKLKPAHDEAMMIRAKEDFEQKKVSKSAATIENHSGRSCRDWCIDIGQIFSKSQICTKWDNRMRVAKAAQTIVCFQHAVLCRFAPYMRYIEMKLKEVLPARFYIHSGKGLDELNSWVKEGRFEGVCTESDYEAFDASQDQYIVAFELALMRYLRLPNDLIEDYKYIKTHLGSKLGNFAIMRFSGEASTFLFNTMANMLFTFMRYELHGDEYICFAGDDMCSSKRLRIKKTHESFLGKLKLKAKVQHTEKPTFCGWNLCADGIYKKPQLVFERMCIAKELNNLHNCIDNYAIEVAFAYKLGELAVNRMDEEELGAFYNCVRLITKFRHLLKSNVVEVFKRK

SEQ ID NO: 527 - protein, 2105 aa, Apple stem grooving virus
MAFTYRNPLEIAINKLPSKQSDQLLSLTTDEIEKTLEVTNRFFSFSITPEDQELLTKHGLTLAPIGFKSHSHPISKMIENHLLYICVPSLLSSFKSVAFFSLRENKVDSFLKMHSVFSHGKIKSLGMYNAIIDGKDKYRYGDVEFSSFRDRVIGLRDQCLTRNKFPKVLFLHDELHFLSPFDMAFLFETIPEIDRVVATTVFPIELLFGDKVSKEPRVYTYKVHGSSFSFYPDGVASECYEQNLANSKWPFTCSGIQWANRKIRVTKLQSLFAHHVFSFDRGRACNEFNHFDKPSCLLAEEMRLLTKRFDKAVINRSTVSSLSTYMACLKTANAASAVAKLRQLEKRDLYPDELNFVYSFGEHFKNFGMRDDFDVSVLQWVKDKFCQVMPHFIAASFFEPTEFHLNMRKLLNDLATKGIEVPLSVIILDKVNFIETRFHARMFDIAQAIGVNLDLLGKRFDYEAESEEYFSENGYIFMPSKSNPERNWILNSGSLKIDYSRLVRARRFRLRRDFLDPISKGKSPRKQLFLESTGNIKSNPNAEKNSESGEIKIEGSAENDQPHEVSHTSMETEDGQGFEGSIPVDLINCFEPEEIKLPKRRRKNDCVFKAISAHLGIDSQDLLNFLVNEDISDELLDCIEEDKGLSHEMIEEVLITKGLSMVYTSDFKEMAVLNRKYGVNGKMYCTIKGNHCELSSKECFIRLLKEGGEAQMSNENLNADSLFDLGRFVHNRDRAVKLAKSMARGTTGLLNEFDLEFCKNMVTLSELFPENFSSVVGLRLGFAGSGKTHKVLQWINYTPSVKRMFISPRRMLADEVEPQLKGTACQVHTWETALKKIDGTFMEVFVDEIGLYPPGYLTLLQMCAFRKIVKGQSENFLKGKLLELSKTCLNIRCFGDPLQLRYYSAEDTNLLDKTHDIDLMIKTIKHKYLFQGYRFGQWFQELVNMPTRVDESKFSRKFFADISSVKTEDYGLILVAKREDKGVFAGRVPVATVSESQGMTISKRVLICLDQNLFAGGANAAIVAITRSKVGFDFILKGNSLKEVQRMAQKTIWQFIIEGKSIPMERIVNMNPGASFYESPLDVGNSSIQDKASNDLFIMPFINLAEEEVDPEEVVGDVIQPVEWFKCHVPVFDTDPTLAEIFDKVAAKEKREFQSVLGLSNQFLDMEKNGCKIDILPFARQNVFPHHQASDDVTFWAGVQKRIRKSNWRREKSKFEEFESQGKELLQEFISMLPFEFKVNIKEIEDGEKSFLEKRKLKSEKMWANHSERSDIDWKLDHAFLFMKSQYCTKEGKMFTEAKAGQTLACFQHIVLFRFGPMLRAIESAFLRSCGDSYYIHSGKNFFCLDSFVTKNASVFDGFSIESDYTAFDSSQDHVILAFEMALLQYLGVSKEFQLDYLRLKLTLGCRLGSLAIMRFTGEFCTFLFNTFANMLFTQLKYKIDPRRHRILFAGDDMCSLSSLKRRRGERATRLMKSFSLTAVEEVRKFPMFCGWYLSPYGIIKSPKLLWARIKMMSERQLLKECVDNYLFEAIFAYRLGERLYTILKEEDFEYHYLVIRFFVRNSKLLTGLSKSLIFEIGEGIGSKWLSSTSTASSRRSNLQTSKLMLSRPQSFTRMQPFSNQTCLIASKGLNQTSRFPLDLVTASSCLISNCLMTPKLIQSGRKATSTNTYTMESSWLGSKQCCQTLEAWKGESLYMMEPAWIRKEATFARIFSSLSLTVATLVSGQSTVCLPQTQIWPKGLDFVWTLIVHNMNRTLSCLLLTLELHTDASTLQGFWKPKLAIQDGLHRQSAAVKHLNSMRKSRWPSWIADPRCFWKKVHQTCTLKRDCSEVTRLEGHAQFPLKGGQTQGCKKREDLGPSRLELKDLEKMSLEDVLQQARRHRVGVYLWKTHIDPAKELLTVPPPEGFKEGESFEGKELYLLLCNHYCKYLFGNIAVFGSSDKTQFPAVGFDTPPVHYNLTTTPKEGETDEGRKARAGSSGEKTKIWRIDLSNVVPELKTFAATSRQNSLNECTFRKLCEPFADLAREFLHERWSKGLATNIYKKWPKAFEKSPWVAFDFATGLKMNRLTPDEKQVIDRMTKRLFRTEGQKGVFEAGSESNLELEG

SEQ ID NO: 528 - protein, 1962 aa, Citrus leaf blotch virus
MALMSNKTAIESILGNFEKKHVDAIYNAAAQTILSHSEFRNKHFAYSLNSYQKKIASKVGIELYPNGYLPHSHPLSKIFENHLLFDVLPGVVNTSRLVMCSIKESKVLVFKGIRDKSRRQVSDLNALNSLNNSHTSFINRLVASKDVSRYTEEADAFFQSKKGSPELFSRNFIKSLENKEAVFFHDEVHHWTKAQMFSFLKSTKVKRFIFTVVYPPEILKKFANSQNPKVYDFKVDKGRLFFFPDGVKTEAYEQKLNMEWLFSASHLRSGDCVWTVTRHKSIYAHHLFEISIGELVTDSKLFFSDYNSIDMSKIFLDRFRSYEVFPISIEHLYKVYSYLLCLKKPDLESGLAKLRQIIGDDVEIKEFLFFEQFCKRLIERQTSWGLFGHSFFEKLTDMALSSLPNSIARIFPQWKKKNTFEFLFSLGTLVVDVERKVCFEHVLEEWGFEVVITDENAYLDPLSIFAINENFNEDRVDDGYLERIRLPFWNLNDYDLKRKRVNAYNILSYRFEEERKIESAQKGPNKMLQIEWYGIKEFKVDPFISNSITEFTLLEALLGKRIDPKKYSYSKQACTLSNYLTFLCAEGLDGFNLEEHLERRLKAAGHDVSDDEEEELTSAEQAGPIKILADPLGFMKECLEEIPIETEPSLEERGQFSTDYHSEKFEINYNDIFNPHNCMNTHGDEIPTPSDGNCFFSAFTETFEVERPDTLRSDFSDWLMEFNGGSYASLAEMIRPNGVFMEAELIYLFCVFRGVTLIIHDRTHEKENVYAVHRGFEEGHMVHRGNHFVGIETYNISTLTSDPLLGDIPCGFSEEITKFHFRPDHFNCAQFRGRKAAFITKVDADYGHNGMVYPHNSWVPSLEEIIQICGQGDDFNCALINFYEANSSLGFHRDNERVYNDDPILTVCTFGEGRFTIEFKDQVTSFLMTAGSFFLMPKGFQKKARHSVSNEMSRVSITFRKHVRRLNGSPIAIREENYKNTCLINAFSKAMKRSKQAIIAKLKTVNSPFWSRYLSEGNGGSIEDCQSACEALDVTVDLNVNGKCVVLGKGALRISMALRNNHFSVINAAQLMERTFVSHLLEKGNVNVLEGFDAMLSGDVGAAGVNKIQFAANFEFARILANSFLNMTTGICLGKALDNGEKYFLHILKDRVKQIGIDVTMVCGFAGSGKSRKLQSWLHSRKKGNFCVVSPRTNLAADWAFKLELEPNEQRKVSTFEKFIKTDKSKLDLIVIDELTLFPNGYLDLLVYELADVNRHCQIILLFDPLQARYHNKMDESILTFEHDVDRLIGGQNIEYIYSTHRMSRYFNRFFDVPCFNQADRTEEQRLWIFDDVYSIPSICSDRQEPCDVLLVESDLEKKAFSPIINVMTFGESQGLTFNHVCILLSESSAASNEFRWMVALTRARTRFSLCSTFLGGIEEFKVKRKESLITSILQGEKITFNRLNLMLKCNLIRREKENGCRDEVDREERLEGDPFLKPFIFLGQRVEKDEDEVEEVKIREPTCQTHLYITEPNFGLCYNFDFIREKEQREYREDMLVTNQFCDSYDKVHINGKRETPGPLRFKAIYPKHSADDDMTFWMAVRKRLVFREEEENYQRLSRAHLVGGLLYTNFKKKMGLEFTFDQGLLEESINAFEKKKLEKSCGTIKSHSIRSDIDWALNDVFLFMKSQLCTKYEKQFVDAKAGQTLACFQHLILVQFAPWCRYLETQIRNQLPEEIYIHSNKNFDDLNAWVKKFFQRDICVESDYEAFDASQDEYILSFEIHLMKDAHFPQKIIDAYIDLKCKLGCKLGHFSIMRFTGEFCTFLFNTLANMAFTMCRYEWRRGQPIAFAGDDMCALNNLAVCHDFDDLFELISLKAKVERTETPMFCGWRLTPYGIVKEPELVYNRFQVAIEEGKVLECLENYAIEVSYAYSLSERLYEVLKSERQVQYHQAVVRFIVTHIDKLKTKVRDLFLEQSSDEDI

SEQ ID NO: 529 - protein, 709 aa, Apple latent spherical virus
GPEQMYIPTARSESFGSVCLLGKWTGPKPYFLENSSLTPSLIHDCIDIDMTTEPAILSKKDPRLQYTNNKDFDPFLSGMGKYAVEAHSFDEDEELFEDALDRVFSEIPMFTCEDLSNDQVCNGIEDDDYAEGLVMQTAEGYPFCTMRPPGVTGKTWLFAGSPGDWHIVPNSLLANELNVKELNLSKNIFEPVIGIDFPKDEKVDSSKVYIKQKTRLFTILPVDYNILVRKYFLSFVSQLMALHNEVPTKVGIDPISNEWSILCHSLHSKGTNWFNGDYSRFDGITPRNVLQGIVKRISRRYANKSSFAITDPTLSINGDLARSLLMDMCSTRYGLTNGDLWYVTSGIPSGFPLTVIVNSLVNSFFVHFAYMKLHSSEVHKALYPLYSFRTLVSYAVYGDDNLISVHDTIKDTFNLVTISNLLLEHGVTLKNGADKNEEILSPFYPIEKVDFLKRRFTTLQGHIVAPLNTVNITERLHWVRKGLGDADATLENCKSALFEALFHGELYYNDLRGKIEKACKVKGLPLIVPDYQDALSLFLTGGSYAKAIQAIAMNLPDRISLYKSEFYSVQIYPQIFYVTNERNVTLQKLLETTTLRNICYVSRNYESRSSSRGLFTLKGEGWTPAALKARLSVYKAMAKPVYFVDEANDGLAMFYCLDYAFRVCGLTRSQIAKILNAVFGGNPEVCQRIFQFFSQVEPTNKYIPPNQRR

SEQ ID NO: 530 - protein, 2195 aa, Soybean latent spherical virus
MSFHCPSSTCLGYTQSFSRRDMREQGDRCPHAMCGALLVKKVPTLSPQGARPVVSKTTVVVPPQATEEVLYYGCAPRPAFLEAVLAAPKLKMAPPVVDAMEVAYLRGVAAMEAEEKKLLRKEKAAVVARAKARRAARKAAKKQVAEMKATVALKLATRQKTARLSAAKRAMKAKRKAAKEAARLALEERRAAGLTRKSAFRRSLKKKATKMAGRKVPKTSTSTFPKVESFSCFPSSPLPAFIREEQPWVAVNTPCPHPEGFDLAVDPAFVAPIVGPIVSVPFMAPVVKAFNSLVEILAAINYEAAVDLRAYILEIASYENFFALRRIFVGKALSWMALILPLYPYAGIFDTYLPLDMVEDKNCDAYLASLQQTAVMVLEVTQGPMDAHSIFDIVRSVGSKVASIKDKVVGCIVEKSAALLDTVIDTAKGMFFGVLGPYLARAQKIGEEIKKFWDNCVEWATKLWQGAHIALQALGIYAVWAIVAMVLVGVMYILETILICLGVMSGHGVLVVALTGAVMTFLGFTVFQMGREYIHFLTALRQIIFLAVIPQGGLTQVNIMDSSVDVTEPHSLLDTAMAPVHFLETVASGLTFFSSTSVTVLGKLGNSLEGIRKGFNCLRDFTSVLLEQFGNAFEYISGKRTSFFRDLACAVKVDIARWTQDARETIEYFEISGSLDRYEYYRARELIYQGQDLIDTANKARSSHTSVKFLRTIGKLVEELKEIRAKCARSLKFPGWRRQPFWVYCFGESQCGKSTLANYLMPLLMSHMGWDPQDVYSKDPVDGYWSGYYQQKGLKINDLSAVNSKDVAPLEQQLIPLISTEEKMVSSAEIEGKGMQFASEIVVSSSNFNDAPTGAEILDADAYRQRRKVLMRCRRAAEWVHNADGTRTEKLDAEGKIVYKPYDPSNALSCTEVQWIHPVSFTALPGPCGQWHLAEFTIPMVKEAMDAHFLQEETKMASWKSSLGMKSQTARKMGSYLQDMIKGIGNFVTLKGAKDSDPRYLLVAVDGKCYALDQQGKATPYEDCDVVEEIERLTLLQYRSYFADLVMEHADNTYYQDSFHSSTVRDFLLALMKDGSTVLSVDSLGSSTQDIHKELWAELGLSEKIFLRVSQIARNQLRDAPHFKEDVAHNFLETMRHLRDAIVDRKEQILLFFAAVALVGLFSWGFLSLIKQFACGSLGFGAGIALREQIAHSSVMSSGSVTSAFVARNMPVVWGKAARYATAHSSKEEVGANFDYFEDASAHLLARVVGSSGQSETCLLFGHQAIALCAHQLRLFPDNDRVTIHYFSKERRPVCFSFTWHYINAIEWPDCEVIVYRDAQLTPLPVYSDDNYLCGEQTLPTVLTITGLSIKKKKFFDDSTLCPSEKILDGEMPIVRSWKDTASLRTQVQTILSETHRRDINRYYTSSYPSGKHDSGGIITAVINGKRKVIGMHCAGAQNGKIYVSTIGLLPTRNINDAHSAADYFVPSIGREEKGFCKIGWIADPSKRPHAATKTALAPVPKELALPLPEGVSVKIPSILSAADPRLRDEVNPEFKDYDPLRVGMDKFANPMDPLDDEVLQRVCEDIYETWYDCLPILDDEKVFLQKTSLEVALNGIPGEACYEAMRLDTSEGYPFVLERKPGESGKLSYVHIDENGVRSLIPGTSVFRDYHELSASILTQVPVLNCIECPKDELLKPSKVLEKPGTRLFDVLPFTHNILLREYFLNFCVFLQQNRVHLPCSVGVNPYSREWTWLFDRLAAKSDKALNCDYSKFDGLISHQVYMHMVATINRLFRDGEEANCARKNLFLMFTSRRSICYDQVYMVKGGMPSGCALTVIINSILNEILVRYVYRITVPMPAKNYFNKYVELVVYGDDNLIAIHDDVVSFFDGPIIKEKLAEVGVTITDGTDKSSPTLLRKPLESLDFLKRGFRKIEGGMYSCPLDKGSLYSRLYYSAGGKGGLFQLDILHDNVKSFLEELTHHADHYEEFQRVRSFYIKRIPSWSATLPTYATCLNMMEGQRNSATPWQPHKFIETRPSGCETKMMAGQDNHAQKICVTERIIICGEKYTPPILETSFVVSIDNPLYIGERGEYVKTEFGSGMGRLPTDAWIKAFSSPKKHPQLFEAYKMGATIYFRSCMPYLNAWCAVCKFALAHGIDQSSIIAMYESCKPRGAGDIAPLVAVKAYTKFVNRPVFKFKETVHKEVLEAHNSVRVA

SEQ ID NO: 531 - protein, 10749 aa, Citrus tristeza virus
ATGTCGAAACTCAGAGGAAGCTTCTGGTCTTCGGCCATCGCTGTTAACAGCGATTACACGATATCGCGCATCTGGCGCAAACTTAACACCATAGTAGTCCTGCACTACTTTGGTTTTGTTAGAATCACCAAGGTGATTCGTGACAAATCGGCTGATATGCCGATAGTCCCTTTACGGAAATCTGTATTTCCGTTTTCTGTTCGCGCGGCTGTCACGAGCTTCGTGCTGCTGGGCGTCCTCTTGACGCTCCGCATTCAGGGTGCCTCTGTGGCCTTCCCGTTATCAACGCATCTGGCGTTGTTCGTCCCCGCTCTGTTCGCGGGTTTTTCGAGGTTTTCTCTGTGCAAACCTCCGCTCACCTCTGCCGCTAAGAGGTCCCTCCGTCAGGCAAAGCGGGAATCTGTTTCCCTTTCTAGCCGGGCCTCTTCTCGCTTCTCTAGGGAAGTCCCTCGCGGCACACGTTCAAGACTTCACAGACGTGTGGTGAGACGAGCTGACACTGCCCCAGTTGAGAGTCCCCAAGACAAGCCTACCCGACGAAACAGCCGACTTGGTAAGACTTCTCACCTCCCTTACGTGGGGGAGGCAGCGTTGGATGATATCCTTCGCTGGATCGAAGAGGTTAATCCTCATCCCTCGATGGTCGCTATTCCAGTGCCCATCACTTTTGGAACCATGCCTGCAACGGCTTGGTGTTCCCACTCTGAAGCCGCAGTTTTGCGTGCCGCCTTGACTATCACGCGGCTGAAACTGATTTCTCCACTCAGGAGAAACACGTACGGTACGTCTATAATGACGTATCTTCTGCCACTAACCGTCCCCGTACGGTTTCTCCCCGCAAGTGCGTCCATTTTTCCCAGTAAATCTAAACTGGGCGTTGAGGTCCCCTCTGGTAGGGACCTTCACACTGCGTTCGTGAGATCTTCTCACGCGAGCGCTTTCTTCTCTGACGCGGTTCGCGCTTCGTTTGTTCCGTCCAGCGCGGAACAATTTTTTCACTTCCGTCGTCAGCGGACGCATGTTCTTGCTATTACAGACCCGGTCCTGTGTGGTACGGTGTCTGTTTTAATGTCGGACGGTGTTAACACAGCACGTCTCGACGTTGTTGCTCCGGCGTACTATGCGTACGCTGAATCTTTGGGCGCCAGAGTGCGCTTTTTGTGGGAGTCGTCCGACGTGGACGACGCTAAAGTTCGTGACGGTCAATGTTATGTCCGTCATGTGTTCGACGTGGCTCTCTACTTTGGGAGACGCGCCGACCTTTCCGTGCGTAGAGCGCTGGGTATGTACCCCACAGTGGGTGCACTAAAGGCTTATCTTGTTCGCGAATACGGTCGCGACTCTCTTAAGGTTCCTATGCGTGGGACCTACACTTTTGGCAGTGTGTTTCACTGCTTGTCGCTAAATCTTCAAGTCGACCTGCGATCTATTCCTAACCATCATTTAGTTGGTGGGACGTCTGCCCACGTCTTAATTGGGCAGGTTCGAGTCAGTGTTCCTGGCTCGATTGTTAAACCTTCACGTTCGGCCGTTCGTAGGCGTAATAGACGCATGCGACGTGATGGTTTTCTCGGTAGTTCCGGTTCTTCTTCTTCTGCGGGGGAGTCGACTCGCTGTTCGGACTGCTCTTCTCCTCGCGGTTTACCTTCTCCTTCCGTTTTAAAACCTTCCCTAGGTCGGATCCCGAGTATAGATCGGCGGTTCCGGTTTCCTGCGGGTACGCAGTTGCGCGTCTCCGTACCTAGGCGGGTCGATGACCATGTTTACGTGTCGACTGGTAGCAACTTCGATGAGTTGTGCCATGCAGTTTTGACACGTATGTCAAAAGGTACAACTCTAGAAATCCTTTTACACTCGATTCGAGAGCGGAAGGGACTACTTGGTTTTGCGGCGTGCTTCCGTTGGGGGTCTTCACACGTGTTTGTAAAGCGTGGCAACTTTACTGCCCGATTTCCTATTTCGGCGGTCAGGTATGAGAATCAGTATGCCGCGGTTATGATGGATGTGGGGACTAGTTGGGTTCCGAAGGGCTACGTTCCCGATGTTGATGTTGTGAAACGTCGGAGAAGTCGTAATCGTCGTTTTCCTCTTTCCCATCGTGCGGTGGATCAGTCGGTCCCCGCGTTACAGTCGAGTCCTGTCGAGGTTGCTTCGGTTTCGAGTGATAAGCCTTCATCGTCGCAGAAGGCTTCTTCACCTTCTACTTCTTCTTCTTCTTCTTTTAACTCGACAAGGAGTTCAGACTGGGTGAATGTCGGTTTCTCTCATCGAACTACTAATAAGGTTCGTGAACCGCGTTATGCTGGTCATCGTAGGATCGGAAATTTTACTTTCCCGAGGGGCACAGTGTACAACACGCCTGTCGATGAGCGCGCCTATAAACGTGTTCTTAGATTGCGAGATACCACAGCCTGTTCCTTTCTCCGTATACTGCTAGCTCGTTTGTCGGGTTACAGACCTTTAAGTGACGAGTTCTTTAACAAGTGTGTCACTTCCCGGTTTGTCGCGTGCATTGAACCTGTGGAATCAGGTCTCGTTAAGGTGCATTTCCGTTCTGATGTTTTCCGTGCCTCTTTCCCGTTTGACGGTCAACCTATACACCCCGCCACGGCTTTGACATTGGAAGTGGTGGTCTCTTGGGATTGGATGGTTACGGCTTTTCAGAATCCCTTGAAGGATGGATATTGCTACATTCGCCATTTCGCCGAAGTTAGTTTGAGCATGGGGCGAATTTTCTTCAGGAGGGACGTCGACTTGGGACCTTTCCCATACGTTTTCGAAGTGCAACACCGTCTTGAAAGGTTGTACGGGAAAGCTGCGTTAAGATACGGTGTTAGGGGTCAATATTCAGCCCCGCGCTGTTTTCACTGTTGCTACAACGATTCACCGAGACCGATGGCGTCCTTTAATGGGTACCATAAGATGGGTGGTGAAGATAACTCCCTGATAATCACAGACACCGACAGGTTGCGTGCTGTGGGGAGTGCCTATGAAAAAGTGAAGAGAAACATACCAGATTCGTTATTGGTTCGGTCTGTAGAAAAGGACCTTATAGAGTTTAATCAGACTCTAGTCGACATGCATCGATCCAGACCGGGCGTTGTCGTACCTTTCCAAATGAGTGAGAATCAGCAAGTGATGCTTACTAGGGCGTACCCGGAATTTAATATTAATTTTATTCATTCCGTACATTCCGATCATCCGGTGGCAGCAGGTTCTAGGGCGTTGGAGAATCATCTCGTTCGTAAACACGCTGGTACCGATTATTCGGATGTGGGGGGTTGTCCGCTGTTTCATTTACGTGCGGGTCACTCCGGCGTTCACGTTTGTAGACCGGTGTACGATGTTAAAGACGCTCATCGTAGAGTAGTCCGTCATCACCAACTTAGTAAGGTTTCGCTAGATCAGAGTGACGGTGTTAAACAAGTTGGCTGGACCGTAAACACGAATTCTGTATGCGGTAACATTTTGGGAGAGTGTTATCATGCATCGGAGGCGATGGTTATGGTTCAAGTTTATGACGTACCGCTACGTGAGTTGTGTAGGGCTATGATAAACAAGAAAACTTCCGTGTGTTATATGACCATGGTTACACCTGGTGAGTTGTTGGACGCCCGCGAGTCCTTTTTTATTAAGGACTTGGATTGTTCGGTTGAGTTAGATCCCATTGCAGACAGGGTTGTTTACTGTTTCAACAATTCTGCGTATACACACACGTACTCCACTATATGTGAGTGTATGCGAACTCCTTGCTTGGTAGTGGACGGGTTTTTGTTTACTATCGAAATGGTATCGCTCAGGTGTAGCGTTAATTACTATTGTATCACCAAGTCGTCGGTCTGTCCGAGAATTAGTGAGACTAAGCGGTTGCGCTACCGTCGGTGTGATAGCGACTTGATTAGAATCAAAATTCCCCGGTACTCCAGTAAGACTCGTAGTTGTTTACCTGGGTGTTACTATTTGTACTTGGACGCCAAGTTTGTAAGTCGCGTGTACGAGTACGTGGTCAATAACTGCGTTGTGGTGAACGCGAAAACTTTTGAGTGGACTTGGAATTACATCAAATCTTGCAAGTCGAGAGTGGTGATCAGCGGGAAGATTATACACCGAGACGAACCAATCGCTTTAGAGTACTTAGATGGGTTTTCTGCGGTTATGCTGTCCGCTGGCGTGAAGGGTAGGCAAAACGCGGACGTTTCTAGACGCTTAGCCGCTTTTTCGGGTGAAACTTCGATTTTCGAGTTAGTGGGGTTTGCTATATCCGAGAAGTGCCGCGACTTGTTCTTGGGTATTCAGGACGCTGTGGAAAGATGCGTGAAGTCGTACCTCAGGAATTCGTTTAATATGAGTTTCGTGGACTTGTCCGACCCCTTACTTACGATTAGCGAATATTCAGAATTGGACGTTCCTATCGACTTACCGGGTTTCGGTGGAATAGTGGACGGTAACGAAACTAGACTTATGGAAGACGGTGTTAAATCGGCTTTATTACGTAAAGCGGTTCAAGCCGAGGCTCAGTTGAGTCTTAAGAGAGGCAATACTTCCGAAATCGTTCCGTGTGATGACGATGACGACTCGAACGGTGATGATTCGCGTGTTTCGCTCGATACGGACTGGTGGTTCGTCCTTCGGGGTGGTAGTTCTGGCGGGTTGCGAGCTGGAGCCGCCCCTTCTTTGTTTAGGTGTTTACTCAGGAAATTGGGTGGGGGTTTATGTTTGGCAAAGAAAGTGTTGGAACTGTTAGTCAAGCGGGTGGTTGAATCGTTTTCTCGTTTGAAGCGGAAAACCGCTCGTTTAACGTCCTTCGCTAATTTGTTGCTTGCGAGGCTCTCTTGCGGGTTTTTCGATGACACTGTTTTTTCTGCGGTCTGGGAAATAGCGATCAACCTGACCAGGATCGTCGATGGAGTAGTCAAGACAAAACTGGGGTGCTTTCGTAATTTATTTCGATTGATTCCCAAGTTATACGCTGGTTGTAAGGACGTTGTGAAGGACGTTAGTAACGCTTACAGGTCGGTTGTCTCGTTTTCCGCTGAGGTTTTGGGTAAGAGTTACTCTAAACTTTGTCAGTTTTGCTTGGAAATATTTGACATCGGGCTTATTGAGGTTTCTGCTCGTAATTTGGGACTGGAAACATGCGTTTCAATAGCACTAGCTATTTTTGATGTGTTGATTACTTTTCCTTTGGGGAGCGTTAGTTTTCCCGTCGTTTGCGCTAGGGTTTTCGGTCGTCTCGCTATGGAAGTGGGATCGAACTTTTTGTTTAAGAAAGTTTTCGGTAAACCCGAAACTCTTGGTGAAGATACTTTCCGTAGGACTGTGAGTATGGTTTTGAGGCCCAAAGCGTTTGACAAGCTTTCCGTGGATGCGAAAGGTTTAGTTAGGTGCTCTGGTGTTATTCCTGGAGTGTTAAGGATAATACTATCTTCCTTGTTTTCCGAAGATGACGCTTGGGTGGGTTATAGTAAACATGAAGTTTCTTCCCTTCCTATTGTTACCTTTTGTGTGAAGAGATTGTCTTATTCTCTGGAGCGGTGTAAGGAAGCGTGTGTCGCATTTATTGTTGACTCTGCTAAGAAGATTTTGAAATCTTTAACTTCAGAGTTCAACGAATCCATTCAAAACTCCGACTTGACCAGTGGTGCTAAGTCCTTGTACGGGCACGTGAGCTCGATACTTTACACCTCTAGTGGTGTGATTAATAAAGCAGGAAGCGCCGTCGCTACTGTTAAAGCGGTCGGGAGTGATATCAGTGGTCGTGTGAAACGTATGCGACCCCGATTTTCTCTGTCCCGTCACTTTGACGAGCAGACTAGTGAGTACTACTCTGCTAGCGATTGTTCCGAACTAGATGAGTCGTTGTTTAGTGAAACGCCTGGTCTTCGTGGAAACGCCAGGTGTAGAGATTTGTTTCGTATCGTGTCTAGACGCGCGGTAGCGTGTTGTGAGTACGTGACAATTCTTTTGAAACGGCTAGCGTCGCGTGCCGGTGAATACTCCTACTCGTATGTGATGGATACGCTCGTGAGATTGTATGTGGCGACCGATGATGTTGTTAGACGGTGCAGGTCCTTTACGTTCGACTGTACTGATAAAGCATCTAATTTCGTCACCGGGTTTCTTAGTTGGCGCAGCTTACGTTCTGGTGCGTACTCTGCAACTCCAGGGTTGGGTGGTGGTAGTAGAGGTTTAACGTCGTTTTCTCACACCGGTGGATTCACGCGCGTTATCGGCGCTCTTGGGAACACCTTATCGGTGGTGTTTGATGAGGAATTCTTCAGAACTTTGCTGCATCGGTTGAGGGCAGATGTTGTGGTTTTACTGGTGGAGTTCTTGAAAAACCTTCCCGTTTGTTTGTTTTCAATATACACTTTTATTGAATGTCGGGGTAGGATCTTTCCTTTAAGAGAGTTCCTATGGGGTTTTTGTCGTTTCGTTTGGGATGTTATCGAGGGGTTGTCCATCAATACTTATCAATACCTCTCTGCTGTCGCTGAGAAAGTGTATCGAGGTGCCTTTAATCGTCGATTTAACGAAGAGGATGAGAGGACGCTTCGAGTGATCACGGAAGCAGAGGGAAGAATCGAATTTTTGCGAGTTGTTCTCGCGGAAATGGAAAGGTTCCGTGCTGCGTCGAACGAGGTTTCTTCGTCGAGGTCGTCTGATAGTCCTTCATTCCCACCTACTTACGGTGAAATTGAGGAGTTAAATGATGATTCCTCCGATAGTGCGCTAGTGATAGGCGTCGACAACGGTACCGGCCGCACTATCGTTGACGGTGAGACCGATTCTGCGTCCGGTAGCGATAGTGACGTTTCTATCCCGTTGGATCGCGATTTTGAACAAATCGGGCGTCTTGGCGGAAACGGTAACGTCGATGTCGTTCGGCTGGGTTTGAAATTCGTTCTGAAGTTGTTACGCAACCTATTCGATGCTAGAAGTTTTAAAGTGTTGTATGGGTTGTTACTTCAAACCCTTTTTTATGGTGGTTCGGTAAATAAATTTGTGTGTCGTCTGGTCTTTAGTCTTGGGACTTGCTTACCTTTCGAGTTACTCCGATTTGCGTGTTCAGCGAGGCGGTTGTTGAAGAGTTTGGCATCATTTGTTTACCAGACTAACCTTTTCAGCGAAGTTATGGTGGAGCATTTGTTTAGCGTTTCCCGACTGCTTTATGATTCCCGGTACTTCGCGACTGTGTTTTCGGAATTGGAGAGACTTAACTTCTATTTAGACTATTTCCTTTCGCTCCCGAAGAGATATCTATTCCCTAATTCTAGGGCTCGTAGTTGTGCTAGGGTTCCGGTTCCCGTGATTAGGACCGAAGGAGTGGCACCAGTCCGTGAGAGATCACTAAATGACATACTGGACTCTTTAGACTCTTTAAAGGTGTCGGACCTCAAAGGGAAGTCGACGTTCGTTGATGATGGGGAGTCGGATTCCGGTAGTGAACATTCGGGTAGTTCGATTTCGTTCGGTTCCGTCAACGAAGAAGTTTTAAATGCGGTAAATGGTGACAGCGTTTGCGAAAAAGCCCCGTTGATGAAGCATGTTACCGCACTTAGCAGGTTGGAACGCCACCCTAGTGGTCGTAAAGACATTCCTGTTTCTAGGAAAACTTTTGTGCGTGGTGAATCTTCGGGTGTGAAATCGAAGGTGAGTATGTGCGATTACTTGGTGACCTTGAATTCTTCGTTTGGCACAGTGCCTGACATGTACCCTGTTGCGCGTGACATAACGTATAAGAAACTGACTAACGCCATGCGCGAATTCTATTACTCGCAAAAAATAACCTTGTACGAACTTCACGGGAAGTTGAGTTCCTATTGGGACGAGTTGAAGGTCGCAGGTTTCGATAGAAAGTTAACGAGAATGGATTTGGACGATGATGTCTATGTTGTTGACTTTAATCGGAAATTGTTGGTGGGGAGAAACGGATCTCATCCGTTTCGTAATACGTTAAAGTCCTATTGTTTTATGTTTTGTAACGATGGGTTGGTTCCTTGCCCGCGTTCTCAGAAATATGATTATGCTTTGATTTCTAATCAAACGTCTTTTGTTGCCGCGAATTCGTTCTTACGTGCCGTGGATGGTAAGGATTTGACTTTTACCAATGAGGAACATAGCCTTATCGTTTATGAAGCTCCTCCCGGTGGTGGTAAGACTCATTCTTTGGTGAATTCGTACGCGGATTATTGCGTTAAAGTATCTTGTTTAGTAGTGACCGCTAACAAGAATTCTCAAACCGAGATATCTCAGCGCATATCTAATGAATTGATGGGCAGGAAGCTAGCTGCTAAGTATGTTACCGATGCAGCTTCCAGAGTGTTCACTGTAGATTCTTACTTAATGAATCACTTGCGACTTACGACTCAACTGCTGTTTATCGACGAGTGCTTCATGGTTCATGCTGGGGCAATTGGAGCCGTGGTTGAGTTCACGTCTTGTAAAGCGGTGGTTTTCTTTGGTGATAGTAAGCAAATCCATTACATTCACCGAAACGATCTCGGGGTTTCCTTTGTTGCAGATATTGATGCGTTTATTCAACCGGAACATCGTATTTACGGCGAAGTGTCCTATAGGTGTCCTTGGGACATTTGCGAGTGGCTTTCCGAGTTTTACCCGCGACACGTAGCTACTGCTAATGTAGGGAGTATTGGGAAGTCGAGTGTGTCAATAGAGGAAATCAATGGGTGCGATGACGTACCTTACGACAAGGCGGCGAAGTACATTGTGTACACTCAGGCTGAAAAGAACGATTTGCAAAAACACCTCGGTCGCTTAACCGTGGGTCGGAACAAGGTAGTACCAATTGTAAATACCGTTCATGAGGTACAAGGAGAGACCTATAAAAGGGTACGTCTGGTGAGGTTTAAGTATCAGGAGGATACCCCGTTCTCTTCAAAGAATCATATTGTGGTTGCTTTGACTAGACATGTTGATTCTTTGGTTTATTCCGTACTTACTAGTAGGAGGTACGACGATACTGCGACTAACATAGATAGGGCGAAGGAAATTTTTGACAAATTTCGTTCGTCGAATCACTCGTACGGTTCGTCATCGTTAGAGTGGTACCTTGAAAAGTATCCTACCGAATATAAGGGTAGTAAAGCATCCTCTGCTCCGATAAGTTGCATTAACGAATTTCTTAATGAGGTCGTCGTTGGTTCTTCTGTCGTGCAGTTGGGTGATGTGTCTGAAGAACTAAGTTCACGTCCCTTTGAATCGGGTTGTGATAATGTTACTGTAGAGACACCGCCCCTCCTGACTCGGGTAACTTACACGAACCGGCTCGCGTTCGGCGTAGTAAGGTCACAAGCAATTCCTCCAAGAAAAGCGTCACTGCAAGAAAACCTTCTGTCGTACGAAAGTCGTAATTATAACTTTATCAAGACGGAACGGTTTGTTGGACCAAGCGAATTTGGTAGGGCGATGGCTGCTGCTGTTATCGAACGTTGTTTCAAAATGGAAGAGATGGCTAAGATAAGGTGTGATATTATATCCCTTACTGAAGCTAACATTTTAAAATGGCTCGATAAGCGCACTCCCTGTCAAATAAAGGCCGTACACGGGGAGTTGAAACTTCCCTTTTCGGTGGAGGAGCAAATTTCCAACTTCAAACTGATGGTTAAACGTGATGCTAAGGTAAAACTTGACGATTCAAGTCTATCTAAACATCCCGCTGCTCAGAACATCATGTTTCATAAGAAGTTTATCAATGCCATATTTTCCCCGTGTTTCGACGAGTTCAAAAATAGAGTGTTGTCCTCGCTTAATGACAATATCGTGTTCTTTACTGAGATGACGAACGCTGGGTTAGCGGAAATTATCAGAAGAATCATTGGTGACGACGACAACTTATTTGTTGGGGAAGTGGATTTCAGTAAGTTCGATAAGTCTCAGGATTTGTTCATTAAAGAGTACGAACGTACGTTGTATTCCGAGTTTGGGTTCGATACCGAACTTCTCGATGTGTGGATGGAAGGTGAGTATCGCGCTAGAGCCACCACGCTGGACGGTCAGCTGAGTTTTTCAGTTGATGGTCAGCGTCGTTCTGGAGGTTCAAACACTTGGATTGGGAATTCCTTGGTTACTCTAGGTATCCTTTCGTTATATTACGACGTTTCGAAGTTTGACTTACTCCTCGTTTCTGGAGACGATTCTTTAATTTATTCGAGTGAAAAGATAAGCAACTTTTCTTCCGAAATTTGCTTAGAAACAGGTTTTGAGACTAAGTTTATGTCTCCGAGCGTGCCATATTTTTGCTCAAAGTTTGTGGTTCAGACCGGTAACAAAACGTGTTTTGTGCCTGACCCTTATAAATTATTAGTAAAGTTGGGGGCTCCACAAAATAAGTTAACCGATGTCGAGTTATTTGAGTTGTTCACTTCTTTTAAGGACATGACGCAGGACTTTGGTGATCAAGTGGTTTTGGAGAAGCTGAAGTTGCTAGTCGAAGCTAAGTACGGTTTCGCTAGTGGGACCACTATGCCAGCATTGTGCGCTATTCATTGTGTGCGATCGAACTTTCTGTCCTTTGAGAGGTTATTTCCTTTCATTAGGGGTTGGTATGTTGTTGACGCTCTAAAACTCAGACAGCTTAGGAAACTCACTAATTTGATCTGTGAACGTGTAGTTTACGACAATCGGGTGAGTTATTTTTCGTACTTCGATAACCCGTTCACTAAACCTGACGCTAACGACGATAACGTGGACGACCTCGGACAAGCGGGTGAATTAGCAACCGGCTGA

SEQ ID NO: 532 - protein, 3171 aa, Spinach latent virus
ATGGATACAATTGTTCAAATGAAAGTATTGTGTTACGAGTCGATGATATTATTAATGATACCTTCAGACGTAAACGCACCAAGGCCGGAAACTGCCATTGGTAGGTTGATTTCCGATGCCGCTGTTTCAGGTGTTTTGCGACAATGCGATTTCACTGCAGCGGAAGCCTCTCAATGTTTTGTTCCAATTATCACCGGAAGATCAGAATGCATTGAGACGCGATTTTCTGGAAGAGAAATACAGTTTCGCAATTTTTCGTATTCCTCACAATCATTCGCTGCTGCGCATCGAGTGTGTGAAGCGGATTATATTTATAGTCGATTCCAGACGAGAAATACCACGATCATTGATATTGGAGGAAATTTTTGCACCCATAGTAAAATGGGTAGAGATAATGTTCATTCATGTTGCCCGATATTGGACGTTCGTGATGGAGCTCGGTATACTGACAGGTTCATGTCTGTGGCGGGGGCTTTGGAAACCCAGCCTGACCGTGAGCTCAGACTGAACTATTGTTCCAATAAATTTGAAGATTGTGATGTTTCCGCACCATGGGCGATGGCGATTCACTCGATTTCAGATATACCGATCACAAGTGTTGTTAAGCATTGTTTCCGCAGAGGGGTCAAGAAATTGATAGCCTCTGTGATGATGGATCCCATGATGCTTGTTGCTTCTCAAGGTTTTATGCCCAGATTGAATGTTCAATGGGAAATTGAACCTGATGAGGAGAACAAAGGTTCCCGGCGAATTTCTTTTCATTTCGTCGATGCTCCTGGATTGTCATATACTCATAACTATGACGTGCTTATGCAGTACATGACTTGTAATCAAGTCATAATCAGTGGGAAAGCCGCGTATCGAGTTGAGCGCGTTGCAGATCTGTCTGGTGTTTTTATTGTTGAGATTAACCCTGGCGGCAACTGCTGGAATGAAAGACTGGATCTAGTTCCCATGCGAGATGTTTCATGCGCGTGGATGACTTCGTTAAAACGTAAGACCTTAGTGCGGGTTGCCATCCCGCAATATATTCATTCATGGGAAGTTAAGTATGTGATTGCCGACACTGATTTTGTTAGAAGAGTTGCTGAAGTGTCGTTCCGTCAGTATAAACCAGAAACACCATTACAGGATTTGGTGAAATCTGTTGCGACGATGATTTCCTCTGCTTCTAACCATTGCATTATCAATGGTGTCACCATGCAAACTGGTACACCGTTGGCCATTGAGGACTATGTCCCAATGGCGGTGACTTTTGTTGCCTTCGCTAAATCAAGATATGATTCGATAAAGGAAGGCATGAAAATGGTTAGGCAGAGAGGTACTAATATCGCGGATCCTAATGATCATTATGATTATGAGAAAGATGGATCGGATGTTAAGAGTTTTTCAAATCACATAATTCCCATGAAGAATACCATCAAGTCTCTGTTTTTCCCCATGAAAGTGAAGATGAATGATAATTCTATGCTCATTTATAGTCAAGGAATCTTGTCAACTGTTGTTGATGAGATAAAAACACTTTTTGGATGGGATGTTTGGGACACTGACGATGCGGTAATACAGTCTCTGCCCTCTTTTTATAAGATGGAGGATGTTTTTCAAGTTACGTCTGACCACTATTGTTTATCACATACATTATCTGTGGATTGGTGGTTGGAGGGACTGTATGATTCTTACCATGACATGCGTGTTGCGCATAAAAAGAAACTTGATGAAGAAGAATCTCGGAAGACCAAGGTCGAGAATGCCTTATTGAAAATTGCTGAGGTTTTGGAGAAACCTGATGTTAGCGATGGTCTTAAAGCTCTTTCAGAATTGCCCATAATATCATCATTATTGGAGAAGAAGAGCGAAGAAATCGTTACAAAACCTCAATGCAGGGATACTGAAAAACCCCATATTAATCCCTATGCTGATGCAATCAAAGAGGCGCAGGCCTATTACGAAGAGCTTGAGGTCGTAAATACTCGCAATTTGAGAGGTGTTGGTGATTACCTCTTTTGGCGAAAGAAGTCGAACTATGCCAGCGTTTGGGGCGCTGATGAATCGAGAGTGGTTCTTGAACCTATGGCAAGGAAGTTTTACTCTCGAGATAGAAATGTTTCCATACCCGAGTATGAGCGAGGTATGACGGTTGATGGTTTCGTCTCCATTAAATGGGTGGACGGAAACATTACTGAGGACACGTGGAAGTGTCTTTCCAAATACGCAGTTGTTTTGCTCGACTCTTCTTGCGTGTTTGATGCCGGTTCACGTATTATGCCAGGTCTGAAAAAGGCATTGGTAATGGATGCAAATTTCAAAATCGTGATCGAGGATGGTGTGGCAGGATGTGGGAAAACAACATCTCTCCTCAAGCAAGCTAAGCCGGATTCGGATTTGTTGTTAGCTGCCAACCGTGAGACTGCAAATGACGCAAAAGCCAGCGGCGTTATTCCTAAAGCGCTTGAATACCGAGTGAGAACTGTGGATTCTTACTTGATGTTGAGAACGTGGTTCACAGCCGAGAGATTGCTCGTTGATGAATGTTTCTTGGTCCATGCTGGCTTGGTCTATGCAGCTGCCACCTTGGCACGAGTGAAGGAAGTAATAGCTTTTGGTGATACAAAGCAGATTCCATTCGTGTCTCGTATACCAACTGTCAAACTCAGACACGCGTCTGTTGTTGGGACGTTGAAGCCAAGAACAATTACCTACAGATGCCCTAGGGACGTGACGGCAGTCCTTAGTGAGAAATTTTATGGTACTAAGGTTAAGACGTTTAATCTTGTTAAACAGTCTTTGGAATTGAAAAACATAGATTCTAGTACCGAAATACCTGTAGAAAAGGATACGCTATATATAGCGCATACCCAAGCTGATAAACATGCTTTGATGCGTTTACCTGGGATGAATGGTATAGAAGTGTTAACTACTCATGAAGCCCAAGGGAAAACAAGAGACCATGTGATACTTGTGCGTTTAAGTAAAACTACCAATTTATTATATTCCGGGAAAATGCCCGATGCTGGTGGTTCGCACAATCTTGTTGGTCTGTCCCGGCATAAGAAATCTTTGAGATATTTTAGTGTCTTTGCCGATGATCCAGACGATCAAATTGCGACTGGAATTCGCTGGTCCAAAACATTGGATGAGCAAGAGTTAGCAGCTTATAGAGCTGCTGGTTAG

SEQ ID NO: 533 - protein, 2394 aa, Spinach latent virus
ATGGATTCTTACCACTTCTTATCTCAGTTGTGTGACTTGAATGTTCTGACTCATGCGCTTTATGTTAATCAAGTGTTTGAGATTGTGGATCAGTCCACAACTAGTTATATGCAGATGTGGCTTTATTCCCGTGTTATTGTCCCAGTTTTGAAATATCATCTCAGTGGAGATATTATATTGGATAAATTGCACGATGTGTTCCTTGGAACCTTTCGTTCAATGATGGTGCCGATGATTATGTTGAACCGACTTTCATTCGTCGTGAAGATGACGACGATGAACCACCACCGGAAAGCGTATTTGCCGCTTGAAGAAAGGGAAAAAATTCATGCTGCGACGTTTCTTGGTCATGATCATTGGGCAAGCGTTACTTCGGGATCATCTTTTTATGATGATCTCGAAATTCTCGCTGATGAGACCGTGAACGATGATTTGCATTTTGATAAAGAATCTTCCATGCCAGATGAGTATCAGATCATGTGGAATGATGGTACAATTGATTCCGTTTGGTCTAGTCAGTTTGAATGCGAAGAACCACCGAAACCGAAATTTATACCACGCCCTTCTGATAAGGTGTGTGATCCAGTGGTTATTCAAGATGCCGTGAACGATATATTCCCATTTCATCATGAGATGGATGATCGATATTTCCAGACGTTAGTGGAGACACAGGATATTTCCCTTGAGGTTTCGAAGTGTTGGATAGATGCCTCCAATTTCAGAGATTTTGTTAAGGGTCCAAATTCTTATGTTGAGCCTGTGTTTCAAACCGGTGCCACTAGTAAGAGAGTGCATACTCAACGTGAGGCTCTTTTAGCTGTGAAGAAAAGGAATATGAATATACCGGAATTGCAATCCACTTTCGATCTTGATGCGGAAGTCAACACGTGTTTCAAACGGTTTCTCACACACGTTGTTGATTTGCCACGATTAAAAAGGTTGCAACCTATGACTGGTGTTGAGGTGGAATACTTCAATCAATACTTGCTTGGGAAGAATCCACCTGTGAAGGAATATCAAGGTCCCTTGACATTGACTGCACTTGATAAATATATGCATATGGTCAAGACGATTGTGAAACCAGTCGAGGACAATTCGTTGAAGCATGAGCGACCTTTGTGTGCCACTATTACCTATCATAAGAAGGGTATAGTGATGCAGGCCTCACCTCGGTTTTTGAGTGCTATGTCAAGATTGGTTTATGTCTTGAAATCAAAAATCCATATTCCCAGTGGTAAGTGGCATCAACTTTTCACGCTGGATGCTGGAAAATCCGATGCCGTAAAATGGTTTAAAGAGGTGGATTTTTCAAAGTTTGACAAGTCTCAGGGCGAGTTACATCACAAAGTGCAGGAGAAGATATTTAATGCTTTAAAGTTACCTCCCGGATTTGTTGAGATGTGGTTTTCCGCCCATGAGCGATCACACATTGTGGACAGAGAAGCAGGGATTGGATTTTCCGTTGATTATCAACGGAGAACAGGAGATGCCAATACGTATTTGGGTAACACTTTGGTTACTTTGATTTGTTTGGCTAGAGTGTATGATTTATGCAATCCCAATATTACCTTTGTCATCGCTTCGGGTGATGATTCTTTAATTGGAAGCGTCGAAGAATTACCGCGCGGACCAGGAGAATTTATTTACAACCCTGTTAATTTTGAAGCGAAATTCCCTCATAATCAACCATTTATATGGCTCAAAGTTTTAGTAAGTGTTGATCTTGAGGATGGTGGAAGAGAAGTGATCGCTGTTCCAAACCCTGCGAAGTTGTTAATTGGTATGGGAAGACGAGACTGTCAATACCAAGCTCTTGATGATTTGTATCAATCATGGCTTGATGTGATATATTATTTTAGAGATGCTCGCGTGTGTGAAAAAGTTGCTGATTTGTGCGCATATAGACAGACGCGAAGAAGCTCTATGTATTTATTAAGCGCTCTGTTGAGCTTGCCTAGTTGTTTTGCTAATAAGAAGAAATTTAAGTGGCTCTGTTATCGTTTAAGAGAGCAAGGGTGTCTGAAGAAGGATATTTATCCTGTAGCAAAACCTATAAGTGCCCATAATATAAGGAAAGAAGATTCAAATGGATGCGATGTTAATCAAGGAACAGATGATTCGTTCTCACGGAAAAAGAATCGTGGATGCTGGGAGTATGTCCCAAAGATGTTGCAGACTGATGTGTCTGTTCCTGTTACTGATAAATCTTTCCACAGTAACAGAGGCTCGTCGGTTTCCCCAACCGATTGCGGTGATGGAGGGTGCTCCAGATCCGCCAGCTCGATTGGTAGTAAAAATACCAAACCTCGCCATAGATTTCGAGCTGCAGGAGTTCACCAACCCAGCGGTCGTGATCCAGACCGTATACCGCCGAATCATCGACGAAGTGCCTAA

SEQ ID NO: 534 - protein, 2364 aa, Olive latent virus 2
ATGGCCGGAGTACTTTATGATGAGGAGTACGTTCCCCAGGAACCGGATTACTTGTATTGCCCGTACGAGTGGGAGGGTGAAGATCCTACCCAATGCGATGCAAATGTTCCGTCCGTCAGCTACCTTGTGGAGGCTGTAAAAAAATCCTTTACTGAGGGTAACCACGATATGCTGATTTCTTGCGAGTCGTACCACGCCGAGTGTTGCGAGGGTCCCTTGATGAACAAGGGTTTGACCCTCTCGACTTACTTTATGAGTTATCCGGGCATTTCATTACCTGCGTTCGGCGGTGGTGTGATTCATGTCACTTCAGCTCGCGTCTGCATGCAAGCTTTTTATGCCGTGACCCCAGGAAGGTGTAGTTGTTCGTGTGGTACGCAATTCATCTATCGTGCCAAAGGTGGAACTGGTCTAACATTTGACGCCACGAACACTATTTCTAGTGCCTTTAAGTTCGAAGACGGGAAAGTGAAATGGTTAACAGAAGACCTAGGCTTGGCATTATTGGCTGGTTGTTTCTTGAAATACGTGCCAATACCTCATGAGATTGAAATTAAGATCGAAAGAAAGGTCGAGCCCGTGTCTGCTCTGGATTTTTGGGAACCAGAAGGATTGATTTCTGACGTACATTTCGTACATCCGCAAGAGAGAGCCTTGGCTCCTGAGCCTCCAATGGATGTAGAGATGGTGAGATTAGTCCGTACGGAATTGTTTGAACACTTTAATCCCACCCTTCTTCTGAACGCTCGGTCGGATTTTTCCGGTGAGAAACTGAAAGAGGTTGAGTTGCCACGAGCTCAATCGGAACCCTTAGTCCCTAGGGTCTGTCTCCCGCGAGGTGATGACGCTTTAATTGATCAGTTTTTCATAGACAAGGCACCCGAGCATTTTAATCGTGAACCTGCCACAGATCAATGGCAGGTGGAATCTGATGACTTTACTGTGGATTTCCCCACCCAAGTGCGATTACGCGAACGGGACGAAGATTGGTTCAGAAGGAAACCCGATTTCGCTGTGTCGTCCATTCGTACAGGTCTCGAGATGCCTCGAATTGCTACAAAGAAGGAAATGTTAATGGCATTCTCGAAGAGAAACGTTGGAGCTCCTCAGATGGTAGAGGTACCTCAGGAGATCCACGTGAAGAGGTTGGCTGATAGGTTCTTCCGGACATTCTTGAAAGAAGGCGGCTGGGATAAGGGGGATGGTCATTATTGGGATGATTTTTTCCATAGAAAGGGTCGAAAGGTCTTTTCATTGGAGAATTGTTACGATGACCCCTTGTCCTCATACTTAGTTATGCTGAAGTCCGCTGGGAAATTCTCTCTAGATCTGAACTTTCCGGTTCGATCGGTACCCCAAACCATTACTTATCATGAGAAGTGGGTTACCGAGGTTTTTTCCCCCATGTTTCTGCAGGTGATGGCAAGATTTTTCTCTCGTCTGCAAGATTGGGTTGTTGTTCCGGCTGGTCCGATGGCTGACTTCTCCCGTGTTTGGCCTAGCTTTGAGGGGAAGTGTTTAACAGAAATTGATCTGAGTAAATTTGATAAATCTCAAGGTAAGCTGTTGCATGATGTGCAGAGGGAGATTTTCCTCCGTCTGGGTTTCCCACCCATTTGGTGTGATTGGTGGTTTAAATTCCACGAGTCTTCCTATTTAAATGATAAGAACCTTGGTATAGCTTTCTCAGTAGATTACCAACGTAGAACAGGCAATACTGCCACTTACTTTGGGAACACGTTGGTAACAATGATTATGATGGCCGAAGTGTATGAACTTGATTCTCTCCCTTTCTGTGGTTTGTTTTCGGGTGATGACAACTTGATCGTGACTGATCGACCTCTTGAAGGTCGAGTTTCGTTATTCCCGAACATGTTCAACATGGAGGCCAAGGTGATGCGTCCGGGTCAGAATTACATGTGTAGCAAATACCTTTGCACTGTAGACGGTCGCGTAACCCCTGTCCCTGATCCTTTTAAGTTGCTGAAGAAAGCTGGTGCCTCGTGTCCTTTGGAGCACCTTGATGACTTTTACGAATCGTTTCTGGATTATACCAAATACCTGGTGAGGGATGAAGTTAGAACATTAATACCCAGGTTGATGGCCCACAGGTATCAAGTCTCGATGGATGAAGCTGGAGTTGCTCTTGATCAGATTATGAGCTGGCGAAAGTCAAAGACTCAATTCTTTAAGCATTTCCAGTACAGGAAACCAATCAAGGACTCGCTCGAGGCTGTGAAATCCGACTTCCTTTCTGCTTTCGGAAAAGTAGATGATCGAATAAGAGTTTGGCGCGGGCGTCGAACCAATCATAAGAAGGAGGTCGATGCTTTAAAGGTCCCATTGGTGAGTTTTAGGGAGTGA

SEQ ID NO: 535 - protein, 4950 aa, Citrus yellow vein clearing virus
ATGGCCACTATTAGGGGTGCCATCGAACGCATTACAGACACCACCGTACGCACTACACTTCAAGAGGAGGCATGCCGCCAAATACGCGCTGAACTTAAAAACGTCGAACACATCAACCGTTACGCTATACAGCCTGACGCCGCCGACGCACTCGAACACCTAGGCATTGGTTCTAACCCCTTCTCTGTGGCACTGCACACACACGGTGCCTGCAAAGCGATTGAGAACCAATTACTCTATGTAGTTGGTACCTTACTCCCAAAAGAACGTGTCACCATGCTCTTCCTTAAGAAAAGCAAGCTCAACATCATGAAACGCTGCCCTAAATTCCAAGACATCTTCCTGAACCAACATATTGAACCACGCGACGTTTCTAGGTACTGCGACTTTAACGTCCAATCCACCTCCACCAGCATACCCACACGAACGGCTTACATCAGTGACACACTCCACTTTATGGACCGTAGAGACCTAGTCCGACTATTCCTAAACAGCCCAAATCTAGAGACTCTCTACGCCACCATTGTTCTCCCAGTCGAGGCTGCTTACAAACAACCGAGCCGCTACCCAGAGATATACCAGATTAACTATGACTTCGACGGTTTCCAGTACATACCTGGAGGCCATGGGGGCGGCGCCTACCACCACGAGTTCGAACAGCTGCAATGGTTAGACACTGGCCATATCCACTGGCGTGGGCCCGACTGTAAAGAGATTCGCATGACAATTACCGCCCAAATGCTCGAAAGCTTAGGTGCGAATCATCTTTTCTGCTTCAAACGTGGGAAACTACTCACCCCACGTGTACGCACTTTCGGCCGAGATACCCAAGTGCTCTTGCCCAAAATCTTCCGCCCGGCCGACAAAAACTTTAACAGGGCAATACCACTAACCCTAGCTAACAAACTACTCCTGTACGCTAAATCCATTAACACAGTGACCTTCCGCGACGTCGTTGCCAAGACACGCCAACTTATGAAGGACAAGGAGCTTGAAACATACACCGGCAACGACCTGTTGCATATGGCCAACTATTTCTTCGCTGTTGGAGCACTGTCAGGAGTTAACTCCTATGACCAATTGCTTGGCCTATCCGCCTGGGAAGCCTGCACCGTCCGTATCAAGAACACCATAACAAATCTCTGGGAAAAGATTGCCGGAAAGAAAGAGTTCGGCAAGCTATTGGAGGCCCTTGAGTGGGAAACATTCACATACTCACGTCAAGTGACCGAATTCACCGTTACGGGACTGCCCGCCCTGCTCCCCCTCCCAGACATCTCAGACCAAGAAGAGATTTTCGCCCAGCAGGACGAGTTAGACAAAATCACTGCCGGCGCTACCAAGATACGGACTATTGACATTATGCGGGGACAAGCTAACCGCGCTAACCCAAAAACTCCGATCAACTCAACACCGGCCCAGGGACCCCAACTGCCCGATACCCCCGACCCAATCGACCAAGCTGCCTCCAAAGACCTCGTCACCAAGCTTCAGAAAAACAAACGCATTTACATCCAAGACGACGGGCCGGAATACCTTATGGGACACATGGCTGAAGTCCCTGCCTGGTATCTTGAACAAGATGATACCACCACTAGACTCAAAAACCGCTGCGCTTGGTTCTTCGGCCCACCCACCTACAGATATGGGCACAACGACATTGAGTACACCACCATAGAATACTACCCTTGGGTCGAGCGTATTGGAGCCATTTTCGGCAAGTACAACACCTGTCTTGCTCAAACTTACGACGCCGGAGCCCGTATTGGATACCACGCTGACGACGAAGACTGCTACGACCCCGACGTCACCGTGGTCACCATCAACCTCACTGGGAACGCCACCTTCCTGCTCAAGACCCCAACCGGCACTAGGACCTGGAAACTTAAACCTGGTGACTTCATTATCATGAAACCCGGTGCCCAAAGGTGCACAAAACATGCCATTAGAGATTGCACAACTAACCGCACATCCTTAACCTTCAGATGGCAGGCCCGCACTTGCCCCACTAACCTCAGAAAGATCACTAACCTACCCAAAGCCACCAACCAACCCCAAACCACTGAATGGCGTCCTGTAACTAAACCACGCCCTAGCACCACCGCTTCCAGCGACACCCAGACCCCACTTGTCATAGACCAGGAACGAGGGTATACCACCACCTCCGACGTGACACCAACGATTAGGCTGCCCGCCGAAAATGGTAATAACACCGGTGCTGGACCCTCCTCCGCATTAACCCTCGCCGACCTGAATGATAACCAAGCGCCGACCACTAACAAAGGAAAAGAGAAACTTGAGGAAATGGTCGAAACTGGCCCAACTATCATGGAACGCTTCCTCAACACCGTTCAGGAACCAACACAAGATTTATGGGACTCCGCCTCTGAATCCGCCGCGAGCTACCTCGCTGAAGGCCTCGGCATCTCTGCCATCCAAGCACTCCCTTGGGCACCTCACTTGGAACTCATCAATGCATTAGGCTTCCAGGGCACTGAAAGGCAATACGGCCCAGACAACTGTCTCATATGGCCTATCACGCATTACAGAGAATTGCCCAGAAGCAACAATGTCGAAGCCCCTCCGGAAGTGCTTGAGCTGCTCGACTGCATCAATAGATACCCCACTGACGTCCCAATGCTCAAAACTCGAGCCGCCGCCTTCGGTTCAGACGTCAAGAATCTACGCATAGGGGCACTTGTTAAGAACCAGGACAAACAGTGGCGCGCATCACTCGCACTACTTTGTGAGGAAAATGAACACCTCCTCCCTACCACTGTAATACACGGCGCTGGTGGCTCCGGGAAATCCCACTTACTCCAACAGTGGGTGGCGTCTACTGAGCGCGGAAATGTAGTCACCATCTTGCCCACTATCGAACTCCTTCGAGACTGGCAAAACAAATGTCCACATGCACCGAAAGAGACTTTCAAAACCTTCGAGAAAGCGCTCATCCAGAACAGCGCCCCCGTGGTTATCATGGACGACTACTCTAAACTTCCCCCAGGGTATATTGAAGCCTACGTCAGCCTCAAGGGCCAGTGCAAACTTCTCATACTCACTGGAGATCCTAGACAGAGCCACTACCATGAGGAGAACCCTGAGGCCTTAATCTCTACTCTTGACCCCGCCACGGACTACTTTGGCAAATTTTGCGCATACAACATCAACGCCACTCATAGAAATGCCAAAACCTTCGCCAATGCGCTTGGGGTGTACTCTGAAAAAGAAATCCCCACCACCATCACCTGCTCATCCTACCAGAAAAGCGGTTGGCCAACACTTGTCCCATCCATCCTTAAAAGAACTGCGCTCAACGACATGGGGCAGCGCTCACTAACCTACGCAGGCTGTCAGGGACTCACCACCCCAAAAGTGCAGATAGTTCTTGACAACGCCACACCACTATGCTCTGACAAGGTCATGTACACCGCACTATCTAGAGCGGTGGACCAAATTCACTTCTTCAACACTGGCCCAAATCACACTGATTACTGGGAAAAGATGAACGCCACACCTTTCCTCAAAACTTTCATCGACCACACACGTGAGGAGACCTTCGCTGAGCACCAACCTGCCGAACCCACAGTGCGTGAGTACGCACCAGCAACGCATTTCCCACCGGCTAACGAGAACCTAGCACTAGAGCCGTGGGTCGAACCGCTGACTGATAAACACTCGCGGGAACTCTTCCACTCTGCCTTAGGCCACAGCAACTGCGTCCAGACTGAAAACACCGTAGTCCAACTTTTTCCCCACCAACAGGCCAAAGACGAAACGCTCTTCTGGAAAACAATAGATGCCAGAATCAAGATAACCACCCCAGAAGAGAACATCAGGGCTTGCAGCATAGCCACTGACATTGGCGACATCTTGTTCCTAAATTACAAAGAAGCCATGGGTTTACCACAAGACCCCATACCCTTCGAACAGGCACTCTGGGACTCTTGTCAAGCCGAGGTGCAACTAACCTACCTCAGCAAGCCTCTGGCTGCACTCGCAAATGCCGCCCAAAGACAAGACCCCGACTTTGACTCCAACAAAATCCAACTCTTCCTGAAATCACAATGGGTCAAGAAAGTCGAGAAGATGGGCTGCCTTAGGATCAAACCCGGCCAAACTATTGCTTCCTTCATGCAACAGACTGTCATGCTATACGGAACTATGGCTCGGTACATGCGCCGCATCCGCACCTCACTTTGCCCACCCGAAATTATGATCAACTGCGAGACCAACCCAAACCAAATCGGAACATGGGTGCGTGAGTATTGGAACTTCAACACCCAGAGCCATGAGAATGACTTTGAAGCGTTCGACCAATCCCAAGACGCCAACATGTTACAATTCGAGCTCATTAAGGCCAAATACCACTCAATCCCCGAGGAGATCATCGCCGGGTATCGACACCTGAAATGCAACGCCCACATCTTCCTTGGGACTATATCGATCATGAGGTTGTCTGGTGAAGGGCCGACCTTTGACGCCAACACAGAGTGCTCCATTGCATACAACCACACAAGGTACTTTGTGCCGAAAGGCACCGCCCAGCTCTACGCCGGAGACGACTCTGCATGCGCGTCGCCCCTCTCTGAAAAACCCAGCTTCCAACATATCTCACCAGAGCTCAGCCTCAAGTCTAAGGCCAAGATTAGAACCCAACAGAAAGGAGACTTTGCGACCTTCTGTGGCTGGCTCATCACTCCAAAAGGCCTGATCAAAAACCCCACCCAGCTTTACGCCTCCTGGTTATTGGCTAAGCACAACAAAGATCTCGCGGACGTGGCCAGAAACTATGCCTTGGACTTACGCATTGCCTATCAACTTAAAGACGAGCTCTATGAGTTATTATCACCTGAAGAACTTGACCACCACCAACTGCTCGTCCGAGAGATGATCAAGCACAAAATGGGCCATCTCCTCAACCTCCCTGAGGGGTTTAAAACAAACTAA

SEQ ID NO: 536 - protein, 5343 aa, Potato latent virus
ATGGCTTTGACTTACAGAAGTCCATTGGAAGATATTGTTGGTGCATTTGAACCAAGTGTTCAAACAGCTATTGCGAACACAGCTGCTAACCACTACAAGCAGCTTGAGGAAGAGAAGGGAATCTTATTTAATTATGCATTGCCACCTGAGGCCAAACAGAGGTTAATAGGCGCTGGCATATATTTAAGTCCCTTTTCCGCTGTTCCACATTCGCATCCTGTGTGTAAAATTTTAGAAAATCATCTGTTGTATGTAGAGCTTCCTAGTAGACTAGATAATTCTTTTATGTTTGTAGGTATTAAAAACTTTAAGTTGGATCTGCTCAAGCGCAGACATGCAAATCTAAGCATGATCCAAACTATCAATAGATATGTTTGTAGTTTAGATAAAATAAGGTACGGTTCAAATTTCGTAGTTAGATCTAGCGCTAGTTATCCAGAGCTTTGCAGACGCAAAGGTGAGCTTGACGGAGCAGTGTTGAGGGAATTGGTGCCTGAGTTGATGATTAAAAGCGCTAAGAATCTATTCTTGCACGATGAGCTTCATTATTGGACCCATCGGGATCTGATTACCTTCTTGGAGGTACTGAAGCCAGACAAACTGTTGGGCACCTTAGTTTACCCACCTGAATTGCTAAAGGGTGCGAAGAAAAGTTTGAACTCTTGGTGCTACACATATAGAGTGGACAAAGACAAATTGTTTTTTTATCCAGATGGCGTCCATTCTGAAGGCTACGAGCAACCATTGAGTGGCGGTTACCTCCTCGAAACAAGTAGGATTACCACACGTGATGGTGAAGTTTATTGCGTCGATGTTGTGTGCAGTAAATTCGCGCATCATTTGATTGCAATAACCCGTGGTGATCTGATTGTACCCACACAACGCAGTTTTGCTCCCTTTGAGGCCATAACTAGTAAAGGTTTGAATAACTTGGTGAGGGGCAAGGTGGAATGTTTCCCCGTATGCGCAAGTGTAGTGTCTAAATTGTATAGGTATTTGCGCACACTCAAAAAACCCGATGAGCAATCAGCAATGGCCAAATTGAGCCAACTTCAGGCAAATCCCACTGGGGAAGAGATACATTTCATCCAGGGCTTTGCCAAATTGGTGATAAATACAAACAAAATCGACAGTTTAATCAACTGCGATAGTATTAAGGTGTTCATGGGCAAATTGTTTGGTCCGTTGCCCAATTGGCTTACCAAGAGATTGAGGAGCGTGCAAGAGGTGTCTCTCGATGAATTTGTCCATTACTTTGAACCATATGTCGTCAACGTGCCCACTAAGCATGTGAACTATGGTTTTGAGTTCAATTACGTAATGGAAGATTTCAGGTACGAGCAGGGTGAGAATGATCTAGTGGATATGCTAGACAATTTTGATGGCTCCACAAAGATGAGCACAAGCCTTTGCATGATGACCCCATACGTCGGCTTAGCACCATTGACCACGCGACGCAAATTCCTATGCCATATCGAGGAGAATTCCATATTCAGAGTGGTGTCTAGGAACATCTTTTGTAGCTACACAAATAGTTACAAAGTGGCCGTGAGCACTGAGGGGGTGGTTCGGATACTTGAGATTTATAGCAAAGTGTCTGTGGATCTACTGGGAGCGTATTTGGGAAAATTGCTCAAGAAAACAGAGTTCATAGAGAGAGTGCGATCAAGGGTTAAGGCAATTGCCATAAAGCACCTCAAGTACACTTGGCAACAGGTTGGTCTAGCTTGGTTCACCAGTGGAAGGCGTGGCTACACAAAATACATTGATTGCAGCCCATACACGATGAATACCTTCAAAGAGCTTAAAGAGAGATGGGGTGTGATTGTGCGTGAATTGTCTAAACAGCAGGACAACGCTGAAGCTGCGAAAAACATACCTGAGCAGGAAATTCAAACGACCAGCAAACCAAGTTGTGTGGAGAAGCGAAATTACTTCTCGAACACTTTGATGACTAGCTTTGCTGCGTCAGGAGTGAAAGGCAAGGAACAGGTGAGCTCCGAAATTGCCAAGGGTAGGGGTGAAAGGAGCGAATTGAGGGCAACTAAATTGATGGGCTCATGCAGCACCCTCGGCAAAGTGGCTCACATAGCATCAAGAAAAGGCTCCATGGGGGTATTGGAATGTGTAGCGAGGGTCATCAAATTGGATTTCCAAACCGCCTTGAAGTTCCTTAGAGTCAAGGGTGTGTGGATGCAGGAGTATGAGAGCATAGGCGAGTTGGAGGAGGAGCAGATACAGAGTCCTGCATATGATTTTTGTGCTGCGATCGCAATGACCTTCAATGTTGAAATTGAATTGACGTTCCCAGGCTCAGAGCTTGTTTACCACTTCGCTGCAAGTTCAACTGTGAGTTGTATCCGCTTGAGCATTTGGGAAGGCGTAGTCACACTGATGAGGGCTGAAAATGATTGCGTTATCACTGCATGTGCACAAGCTTTAGCTAGGGAGCCTGAGGATGTAGTGAAGGTGCTCAAAGATAGATTGGAGGAGAGCATACTGGAAGAGATTTGGAACGGCGAAGGGGTGCCTTTCGAGAGAATGTATCTCTTCTTTGAAGCTCTGGATATTCAAGCACATTGCAATCGCGATGGTGCACAGCTAGTGTTGAATGGCGGGGGCAAGCTGGCGCGATGTTTCGTGATTAAAGAAGATCACATCGAGTTCGCAGGTGAGAAAAAGGTCAGTAGAGTACTTGAGCTCCAGGATGCTAGAACAAGTAGTAAAGCAGACCCAGAATTGGTCAAGGAGTTTCAGAAAGCCGGGACTGTGGTAGAATATGTAGCAGTGCAATCCAGAGCGCAAGTCCTGGCGAAGAGTCTAGTGGATGCAACCACTGGGGTGTGCAGCTCAACCATATTCAATGACTGTGAGAGCTTGGAACGTTCCTTTAGATTCACCGAAAGCGAACTAGCGCGAAATGTTTGTTGTGTTATCGGTACGTTTGGGGCTGGGAAGAGTACCCTGTTCAAGGATATGATGAGGCAGTGCCTAGGGAAAGGTGTTCACTACGCATCACCTAGGAAGGTGTTGGCGAATGAGCTCAAAGCTAGTTTGGGTTTGGCAAAAGGGAAGCGGAATCGAAAAGTAGGGACAGAGAATTGGAATGTGCACACCTTCGAAAGTTTCCTAAAGAAGGCGAAAAATGTTGCAGAGGGTGAGTTGGTGATCATTGATGAGATCCAGTTGTACCCGCCTGGCTACCTGGATCTTCTACTTTACCTCATACCTGAGTTCACTAGCGTCTTCGCGGTCGGTGATCCATGCCAAAGTGATTATGACAACGAGAAGGATAGGCATGTCTTCTTAGGGGTTGAGACAGATGTCTGTAGGCTTCTGAGCGGCCGTGAGTACGAATTTAATGTACTTTCCCGCAGATTCCACAACTTAGGCTTTGAAAGCAGATTGCCCTGCAGATTCAAATTCCCGGCTGGAGCAGTCAAGGAAGAGTATTTGTTCGTTAATTCAATGACTGAGGCTAATGAGTTGGACAGCGCCTACAAAAGTGTGTACCTTGTGTCATCCCACTTGGAGAAGAAAATAGTGGAGTACCAGAGTGACGTTAAAACGCCGAATGTGCTGACGTTTGGTGAGTCGACTGGTTGCACCTTCAAGTATGGTTGCATTCTCATCACGCAAGTGAGTAGCGCATGTAGTGAGCGCAGGTGGATCACTGCTCTATCGAGATTTTCTCACAATCTCTGTTTCATCAATGCAACTGGTGTGCCCATAGAAAATGTGGCGAAGAGTTACAAAGACAGAAGTTTGGGAAAATTCCTGTGTGGAACTGCTGTTGAGGGTGATATAAAATCAATGGCTTATGGGACCCCAATCTTCAAAGAGCAGTTCATCGCCGGCGTTGGGCGCGATGAAGGTGTCAAGGAGGATAAAGTCACCGGTGATCCTTGGTTGAAAACCATGTTGGATTTGATGCAGCTCCCAGATGTTGAGGAAGCAGAGATGATGCAGGAAGAGATGCAAGAAGAGTGGTTCAAAACCCATTTGCCACAAGAGGAAATAGAAGGGGTCAGATGCCGCTGGATTCACAAAATGCTAGCTAAAGAAGCGAGGGAATGTAGAATGGGATCGATCGTTTCAGACCAATTCCCAGATGATCATAGCAAGCAAGAGGGGAAGCAAATCACTAATGCAGCTGAGCGTTTTGAAGCTATATACCCAAGACATCGGGCAAACGACACAGTCACATTCATTATGGCTGTGAAGAAAAGGCTGAGATTTTCCAGGCCTTCTGTTGAGAAAGCGAAGCTCACGCAGGCTGAATGTTATGGAACTTACCTGCTCAAAAACTTCTTGGATGTGATCAAGCTCAAGCCCGCACATGATGAGGCAATGATGATCAGAGCGAAGGAAGATTTTGAGCAGAAGAAGGTGAGTAAGAGTGCTGCAACCATAGAGAATCACAGTGGGAGGTCATGCAGAGATTGGTGCATAGATATAGGGCAGATCTTTTCGAAAAGTCAGATATGCACCAAATGGGACAACAGAATGCGGGTAGCTAAAGCAGCACAAACGATTGTTTGCTTTCAACATGCCGTCTTGTGCCGCTTTGCTCCCTACATGAGGTACATTGAAATGAAGCTGAAAGAAGTGCTGCCGGCTCGGTTTTACATTCATAGTGGCAAAGGTTTAGATGAGCTCAACTCTTGGGTTAAAGAAGGTAGGTTTGAGGGAGTGTGCACTGAGTCCGATTATGAGGCTTTTGACGCTTCGCAGGACCAGTACATCGTCGCTTTTGAGTTGGCACTGATGAGGTACCTTAGGCTTCCAAATGACCTGATTGAGGATTACAAGTACATAAAGACTCACTTGGGTTCCAAGCTGGGGAATTTTGCAATCATGCGCTTCTCTGGTGAGGCCAGCACTTTTCTATTCAACACAATGGCAAACATGCTCTTCACCTTCATGCGGTATGAGCTTCATGGCGATGAGTACATTTGCTTTGCTGGTGATGACATGTGTTCATCAAAGAGATTGCGAATCAAGAAAACACATGAAAGCTTTCTTGGAAAGCTGAAGTTGAAGGCTAAGGTGCAACACACTGAGAAGCCCACATTTTGTGGCTGGAATTTATGTGCTGATGGAATATACAAGAAGCCACAGCTGGTCTTTGAGAGAATGTGCATTGCCAAAGAGCTCAACAACCTGCACAACTGCATCGATAATTACGCAATCGAAGTGGCTTTCGCTTACAAACTTGGGGAGCTGGCTGTTAACAGGATGGATGAAGAGGAATTGGGGGCCTTTTACAATTGCGTTAGGCTCATAACAAAATTCAGGCATCTGCTCAAATCCAATGTAGTGGAGGTCTTTAAGCGTAAATAG

SEQ ID NO: 537 - protein, 6318 aa, Apple stem grooving virus
ATGGCTTTCACTTACAGAAACCCCCTCGAAATTGCAATCAACAAACTTCCTAGTAAGCAGTCTGATCAACTGCTTTCCTTGACCACCGACGAGATTGAAAAGACCTTAGAAGTGACCAACCGCTTCTTCTCTTTTTCAATCACACCAGAAGATCAAGAATTGTTGACTAAGCATGGTCTAACACTTGCACCTATAGGGTTTAAGTCACACTCCCATCCAATATCCAAAATGATAGAAAATCATCTCCTGTATATATGTGTTCCGAGTCTTTTATCCTCCTTTAAGTCAGTTGCCTTTTTTTCACTTAGGGAAAATAAAGTAGACAGTTTTCTTAAGATGCATTCAGTCTTTTCCCATGGAAAAATTAAATCTTTGGGGATGTACAATGCTATAATTGATGGGAAAGATAAATATAGGTATGGTGATGTAGAGTTTTCATCTTTTAGGGATAGAGTGATTGGTCTTAGAGATCAATGCCTTACACGTAACAAATTTCCAAAAGTTCTGTTTCTTCACGACGAGTTGCACTTTCTAAGTCCATTTGACATGGCTTTCCTATTTGAGACAATCCCAGAAATTGATAGAGTTGTTGCAACCACAGTTTTTCCAATAGAACTTTTATTCGGGGACAAGGTCTCTAAGGAACCCAGGGTTTATACCTACAAGGTCCATGGCTCTTCATTTTCATTTTATCCGGATGGTGTTGCCTCTGAGTGTTACGAACAGAATTTGGCAAATTCTAAATGGCCCTTCACCTGCAGCGGCATACAATGGGCTAACAGGAAAATTAGGGTAACCAAGCTACAGAGTCTCTTCGCCCATCATGTTTTCTCATTTGACAGGGGGAGGGCTTGTAATGAATTTAATCATTTCGACAAACCTAGCTGTCTACTTGCGGAAGAAATGCGCCTTTTGACCAAAAGGTTTGATAAAGCAGTTATTAACAGAAGCACAGTCTCTTCCCTCAGTACATACATGGCTTGTCTTAAAACTGCAAATGCGGCTTCAGCTGTTGCCAAGCTGAGGCAGTTGGAGAAGAGGGATCTTTACCCAGATGAGTTGAACTTCGTCTATTCCTTTGGAGAGCATTTCAAAAATTTTGGGATGAGAGATGACTTTGATGTGTCAGTTCTACAATGGGTCAAAGACAAATTTTGCCAGGTCATGCCTCACTTCATCGCCGCCAGTTTCTTTGAACCAACAGAATTTCATTTAAACATGCGCAAATTGTTGAATGATCTGGCTACTAAAGGAATAGAGGTTCCCCTTTCTGTGATCATCCTGGACAAAGTCAACTTCATAGAGACCAGATTTCATGCCAGGATGTTCGACATAGCACAGGCAATCGGGGTGAACCTAGATTTACTGGGGAAAAGATTTGATTATGAGGCTGAGAGTGAAGAGTACTTTTCAGAGAACGGTTACATCTTTATGCCCTCTAAATCAAATCCAGAGAGAAATTGGATTCTAAATTCCGGTTCGCTGAAAATTGACTATTCAAGATTGGTAAGAGCCAGGAGATTTAGATTGAGAAGAGATTTCCTAGATCCCATATCTAAAGGAAAATCCCCTAGAAAACAACTCTTCTTGGAGTCAACGGGAAACATTAAATCAAATCCCAATGCTGAAAAAAATAGCGAGAGCGGCGAAATAAAGATTGAAGGCAGTGCCGAAAATGATCAGCCACATGAGGTATCACATACTTCAATGGAAACCGAGGATGGACAGGGTTTTGAAGGTTCAATACCAGTTGATTTAATCAATTGCTTTGAACCAGAAGAAATCAAGCTTCCAAAGAGAAGAAGGAAAAATGATTGCGTCTTCAAGGCCATCTCTGCACACTTGGGGATTGACTCTCAAGATTTGTTGAATTTTTTGGTAAATGAAGACATATCAGATGAATTACTTGATTGCATTGAAGAGGACAAAGGACTGTCACATGAAATGATTGAAGAAGTTTTGATCACAAAGGGTCTTTCAATGGTTTATACTTCTGACTTCAAAGAAATGGCAGTTCTTAATAGAAAGTATGGAGTGAATGGCAAGATGTACTGCACAATTAAAGGCAATCACTGCGAGCTGAGTTCCAAAGAGTGCTTCATCAGATTATTGAAAGAAGGTGGTGAAGCGCAGATGTCAAATGAAAATCTAAATGCTGATTCCTTGTTCGACCTTGGAAGATTTGTGCATAATAGAGACAGGGCTGTCAAGCTAGCAAAATCAATGGCAAGAGGCACAACAGGCCTCCTGAATGAATTCGACCTAGAATTCTGCAAGAACATGGTGACCCTTTCGGAGTTGTTTCCTGAAAACTTTTCTTCTGTTGTCGGGCTAAGGCTTGGGTTTGCGGGTTCTGGTAAAACGCATAAGGTGCTTCAATGGATTAATTACACTCCAAGTGTCAAAAGAATGTTTATAAGTCCAAGGAGAATGCTGGCGGATGAAGTTGAACCTCAACTCAAGGGAACGGCCTGTCAGGTGCATACATGGGAGACTGCACTTAAAAAAATCGACGGAACTTTTATGGAAGTTTTTGTTGATGAAATAGGTTTGTACCCACCTGGATACCTTACACTGCTACAGATGTGTGCTTTCAGAAAGATTGTTAAGGGACAAAGTGAAAATTTCTTGAAAGGCAAACTGTTGGAATTGTCAAAGACTTGCTTAAACATAAGATGTTTTGGTGATCCATTGCAATTAAGGTATTACTCAGCTGAAGACACCAATCTATTGGACAAAACACATGATATTGACCTCATGATCAAGACGATCAAGCACAAATATCTTTTCCAAGGGTACAGGTTCGGTCAGTGGTTTCAAGAACTGGTGAACATGCCCACTAGAGTGGATGAGTCGAAATTCTCAAGGAAGTTCTTTGCAGACATTTCAAGTGTAAAAACTGAAGATTACGGACTCATCCTAGTTGCCAAGAGAGAAGATAAAGGTGTCTTCGCTGGAAGAGTTCCTGTAGCAACAGTGAGTGAATCTCAGGGAATGACCATTAGCAAAAGGGTGTTGATATGTTTGGACCAAAATCTTTTTGCCGGGGGAGCCAATGCAGCCATTGTTGCAATAACAAGATCAAAGGTCGGCTTTGACTTTATCCTTAAAGGGAATTCATTGAAAGAGGTACAGAGGATGGCACAAAAGACAATTTGGCAGTTCATCATTGAAGGGAAGTCTATTCCGATGGAGAGGATAGTGAACATGAATCCTGGAGCCAGCTTTTATGAGAGTCCTTTGGATGTTGGAAATTCATCAATTCAAGACAAAGCTTCTAATGACCTGTTCATAATGCCTTTTATAAATTTGGCTGAGGAAGAAGTTGACCCAGAGGAAGTTGTTGGGGACGTAATTCAACCTGTTGAGTGGTTCAAATGTCATGTGCCTGTCTTCGACACAGATCCGACGCTTGCGGAGATTTTTGATAAGGTTGCAGCAAAAGAAAAAAGGGAATTCCAGTCTGTGCTGGGTCTTTCAAATCAATTTCTTGACATGGAAAAGAATGGATGCAAAATAGACATCTTGCCCTTTGCGCGACAAAATGTTTTTCCACATCATCAAGCGTCTGATGATGTTACTTTCTGGGCAGGTGTTCAAAAAAGAATTAGAAAGTCGAACTGGAGAAGGGAGAAATCGAAGTTTGAGGAATTTGAAAGCCAAGGGAAAGAACTTCTTCAAGAATTCATCTCAATGCTACCGTTTGAATTCAAAGTGAATATCAAGGAGATTGAAGATGGAGAGAAGAGCTTTTTAGAAAAAAGAAAGCTAAAATCTGAGAAAATGTGGGCAAATCATTCGGAGAGATCAGACATTGACTGGAAACTTGACCACGCCTTTCTCTTCATGAAATCACAATATTGCACGAAGGAAGGGAAGATGTTCACCGAAGCTAAAGCTGGCCAAACTTTGGCCTGTTTCCAACATATAGTCCTATTTAGATTTGGACCCATGTTGAGAGCAATTGAAAGTGCCTTTTTGAGAAGCTGTGGAGACTCATACTACATACACTCCGGGAAAAACTTCTTCTGCCTGGATAGCTTTGTGACAAAGAATGCAAGTGTCTTTGATGGATTTTCAATTGAGTCAGACTACACGGCCTTTGACTCATCTCAGGACCACGTCATATTGGCCTTTGAAATGGCACTGTTACAATACCTGGGCGTGTCAAAGGAGTTTCAGCTAGATTACCTTAGACTGAAATTAACTCTCGGATGCCGTCTCGGATCACTAGCAATAATGAGGTTCACAGGAGAATTTTGCACTTTCTTATTCAACACATTTGCCAATATGCTGTTTACTCAATTGAAGTACAAGATAGACCCAAGGAGGCATAGGATTTTATTTGCTGGGGACGATATGTGTTCCTTGAGCTCTCTCAAAAGAAGGAGAGGGGAGAGAGCGACAAGATTGATGAAGAGCTTTTCCCTAACTGCAGTAGAAGAGGTGAGAAAATTCCCAATGTTTTGTGGATGGTACTTAAGTCCATATGGTATCATTAAATCTCCAAAATTGCTGTGGGCCAGGATCAAGATGATGAGTGAGAGACAGCTTTTGAAGGAATGTGTTGATAATTACCTATTTGAGGCGATATTTGCCTACAGATTAGGTGAGAGGCTTTACACAATTTTGAAAGAAGAGGATTTTGAATACCATTATCTTGTCATAAGATTTTTTGTTAGAAATTCAAAATTGTTAACAGGGTTGAGCAAAAGCTTGATATTTGAAATTGGGGAGGGCATCGGGTCCAAATGGCTATCGTCAACGTCAACCGCTTCCTCAAGGAGGTCGAATCTACAGACCTCAAAATTGATGCTATCTCGTCCTCAGAGCTTTACAAGGATGCAACCTTTTTCAAACCAGACGTGCTTAATTGCATCAAAAGGTTTGAATCAAACGTCAAGGTTTCCTCTCGATCTGGTGACGGCCTCGTCCTGTCTGATTTCAAACTGCTTGATGACACCGAAATTGATTCAATCAGGAAGAAAAGCAACAAGTACAAATACTTACACTATGGAGTCATCCTGGTTGGGATCAAAGCAATGTTGCCAAACTTTAGAGGCATGGAAGGGAGAGTCATTGTATATGATGGAGCCTGCCTGGATCCGAAAAGAGGCCACATTTGCTCGTATCTTTTCAAGTTTGAGTCTGACTGTTGCTACTTTGGTCTCAGGCCAGAGCACTGTTTGTCTACCACAGACGCAAATTTGGCCAAAAGGTTTAGATTTCGTGTGGACTTTGATTGTCCACAATATGAACAGGACACTGAGTTGTTTGCTCTTGACATTGGAGTTGCATACAGATGCGTCAACTCTGCAAGGTTTTTGGAAACCAAAACTGGCGATTCAGGATGGGCTTCACAGGCAATCAGCGGCTGTGAAGCACTTAAATTCAATGAGGAAATCAAGATGGCCATCCTGGATCGCAGATCCCCGCTGTTTCTGGAAGAAGGTGCACCAAACGTGCACATTGAAAAGAGATTGTTCAGAGGTGACAAGGTTAGAAGGTCACGCTCAATTTCCGCTAAAAGGGGGCCAAACTCAAGGGTGCAAGAAAAGAGAGGATTTAGGTCCCTCTCGGCTAGAATTGAAAGATTTGGAAAAAATGAGTTTGGAAGACGTGCTTCAGCAAGCGAGGCGCCACCGGGTAGGAGTATATCTATGGAAGACTCACATAGACCCGGCAAAGGAACTTCTGACGGTTCCTCCCCCTGAAGGATTTAAGGAAGGTGAAAGCTTTGAGGGCAAAGAGCTTTACCTTCTTCTTTGCAACCATTACTGTAAATACTTGTTCGGTAATATTGCTGTCTTTGGGTCATCTGATAAGACCCAGTTTCCCGCTGTTGGATTTGATACACCTCCGGTTCATTATAATTTGACAACGACCCCAAAGGAAGGGGAGACTGACGAAGGAAGGAAGGCCAGAGCGGGTTCGTCTGGCGAAAAAACAAAAATTTGGAGGATCGATTTGTCAAATGTTGTTCCTGAATTGAAAACCTTTGCTGCCACTTCCAGGCAGAACTCTTTGAACGAATGTACGTTCAGAAAGCTTTGCGAGCCATTTGCCGATTTGGCTCGAGAATTTCTACATGAAAGGTGGTCTAAGGGATTGGCCACCAATATTTACAAGAAATGGCCCAAAGCTTTCGAAAAAAGTCCATGGGTGGCCTTTGATTTTGCCACTGGTCTGAAAATGAATCGTCTAACACCTGATGAGAAACAGGTGATTGATAGAATGACCAAAAGACTTTTTCGTACTGAAGGACAAAAAGGGGTTTTCGAGGCAGGTTCGGAAAGTAACCTGGAACTGGAGGGTTAG

SEQ ID NO: 538 - protein, 5889 aa, Citrus leaf blotch virus
ATGGCTTTGATGAGCAACAAAACTGCAATTGAATCTATTTTGGGTAACTTTGAAAAGAAACACGTCGATGCAATCTACAATGCCGCCGCACAAACTATCCTCTCTCACTCTGAATTTAGGAATAAGCATTTTGCTTATTCACTCAATTCTTATCAAAAGAAGATAGCCTCAAAGGTGGGTATTGAATTGTATCCAAATGGTTATTTACCACATTCCCATCCATTGTCAAAAATTTTTGAGAACCATTTGCTTTTTGATGTACTTCCTGGCGTAGTAAATACTAGTAGATTAGTTATGTGTAGCATAAAGGAGTCCAAAGTTCTGGTTTTTAAAGGGATTCGCGACAAATCCAGAAGACAGGTTTCAGACCTCAATGCCCTCAATTCCTTAAATAATAGTCATACATCATTCATTAATAGGTTAGTTGCATCCAAAGATGTGAGTAGATATACGGAAGAAGCTGATGCTTTTTTTCAATCCAAGAAAGGGAGTCCGGAGCTATTTTCAAGGAATTTCATCAAAAGCTTGGAAAATAAAGAGGCTGTTTTTTTTCATGATGAAGTTCATCACTGGACTAAGGCCCAAATGTTCTCATTTCTTAAAAGCACGAAGGTCAAAAGGTTCATTTTCACTGTAGTCTATCCACCAGAAATTCTCAAAAAATTTGCCAATTCCCAGAACCCAAAGGTTTATGATTTCAAAGTTGATAAGGGTCGGCTTTTTTTTTTTCCGGATGGGGTTAAGACAGAGGCCTATGAGCAGAAATTGAATATGGAGTGGCTCTTTTCAGCATCACATCTTCGCAGTGGAGACTGTGTATGGACTGTAACAAGACATAAGAGTATTTATGCTCATCACCTGTTTGAGATATCCATTGGCGAACTAGTCACGGACTCAAAACTTTTTTTTTCCGATTATAACTCCATTGACATGTCTAAAATATTTCTTGATCGTTTTCGGAGTTATGAGGTATTCCCCATTTCGATTGAGCACCTTTATAAGGTCTACTCTTATCTGCTTTGCCTCAAAAAACCTGACTTGGAGAGTGGTCTAGCTAAATTAAGGCAAATTATTGGAGATGATGTCGAAATCAAAGAATTCCTCTTCTTTGAACAATTTTGTAAGCGCTTAATTGAACGCCAAACCTCTTGGGGGCTATTTGGGCACTCTTTCTTTGAAAAATTAACCGATATGGCATTGTCATCCTTGCCCAACTCTATAGCCCGAATTTTTCCTCAATGGAAAAAAAAAAACACATTTGAGTTCCTTTTCTCACTTGGGACTCTTGTTGTGGATGTGGAGAGAAAGGTGTGTTTTGAACATGTGCTTGAGGAATGGGGATTTGAAGTTGTTATCACTGATGAAAATGCCTATCTTGATCCACTATCTATCTTTGCTATCAATGAAAATTTTAATGAGGATAGAGTGGACGATGGTTATTTGGAAAGAATCCGTCTTCCCTTCTGGAATCTGAATGACTATGACTTGAAAAGAAAGAGGGTAAATGCGTATAACATTCTCTCTTATCGATTTGAAGAGGAGCGAAAAATTGAATCAGCGCAAAAAGGTCCAAATAAGATGCTCCAGATTGAGTGGTACGGGATTAAAGAATTTAAAGTTGACCCTTTTATCAGCAACTCCATAACTGAATTTACTCTTTTAGAAGCATTGCTGGGAAAGAGGATAGATCCAAAAAAATACTCATATTCAAAGCAAGCCTGCACTCTTTCCAACTATCTCACATTTTTGTGTGCTGAGGGTTTGGATGGATTCAATTTGGAAGAGCACCTTGAACGAAGGTTGAAAGCGGCCGGTCATGACGTTTCAGATGACGAGGAGGAAGAATTGACTTCAGCTGAACAAGCGGGGCCTATCAAGATATTGGCTGATCCACTTGGTTTTATGAAAGAGTGTTTGGAGGAGATCCCAATCGAAACTGAACCATCACTGGAAGAAAGAGGGCAGTTTTCCACTGATTATCATTCTGAGAAATTTGAAATCAATTACAATGACATTTTTAATCCTCACAATTGCATGAACACTCACGGCGATGAAATTCCCACACCGTCAGATGGCAATTGTTTTTTTTCAGCATTTACTGAAACTTTTGAAGTTGAAAGACCTGACACCTTGAGGTCTGATTTCTCAGACTGGCTTATGGAATTTAATGGGGGGTCCTATGCTTCACTTGCAGAAATGATCAGACCGAATGGAGTTTTTATGGAGGCAGAACTCATATACTTGTTTTGTGTATTTAGAGGAGTCACGTTGATTATTCATGATAGAACTCATGAAAAAGAGAATGTTTATGCTGTACACCGCGGGTTTGAGGAGGGCCATATGGTACATAGAGGCAATCATTTTGTCGGGATTGAAACTTACAATATTAGTACTTTAACCTCAGACCCCTTACTTGGTGACATCCCATGCGGTTTTTCAGAGGAAATTACAAAATTCCATTTTCGGCCTGATCATTTCAACTGTGCCCAGTTCAGAGGAAGGAAGGCGGCTTTTATCACCAAAGTTGATGCAGATTACGGGCACAACGGTATGGTTTACCCCCACAATTCATGGGTACCTTCTTTAGAAGAGATCATTCAGATCTGTGGTCAGGGAGATGATTTCAATTGTGCATTAATAAATTTCTATGAGGCAAACTCATCTCTTGGGTTCCATAGGGATAATGAACGGGTGTACAATGATGATCCTATTTTGACCGTCTGCACATTCGGTGAAGGTAGATTCACCATTGAATTTAAGGATCAGGTAACTTCTTTTCTAATGACTGCTGGCTCTTTCTTTTTAATGCCTAAAGGGTTCCAGAAGAAGGCAAGACACTCTGTCTCAAATGAAATGTCGAGAGTCTCGATTACTTTCAGGAAGCATGTTAGAAGGTTGAATGGGTCACCGATTGCCATCAGGGAAGAAAATTACAAAAATACATGCCTCATTAATGCCTTTTCAAAAGCAATGAAAAGGAGCAAACAGGCAATCATTGCAAAACTGAAGACTGTTAATAGCCCTTTCTGGAGTAGATACCTATCTGAGGGTAACGGTGGCTCCATTGAAGATTGTCAATCGGCCTGTGAGGCACTGGATGTTACTGTCGACCTTAATGTAAATGGAAAATGTGTGGTTCTTGGAAAAGGGGCTTTAAGAATCTCAATGGCTTTAAGAAACAACCATTTTTCAGTTATCAATGCTGCACAACTGATGGAGAGGACTTTTGTTAGCCACTTGCTTGAAAAAGGAAATGTCAATGTGTTAGAAGGATTTGACGCAATGCTAAGTGGTGATGTGGGCGCAGCAGGTGTTAACAAAATTCAATTTGCAGCCAATTTTGAATTTGCTAGAATTTTGGCAAATTCATTTCTAAATATGACAACTGGCATCTGCCTGGGCAAGGCATTGGATAATGGGGAAAAGTATTTTCTCCACATTTTGAAAGATAGAGTGAAACAGATTGGTATAGACGTCACAATGGTGTGCGGATTTGCTGGATCGGGGAAAAGTCGCAAACTGCAGTCCTGGCTGCATTCAAGGAAAAAAGGGAACTTCTGTGTGGTTTCCCCAAGAACAAACTTAGCCGCTGACTGGGCATTCAAGTTAGAATTAGAGCCCAATGAACAGAGAAAGGTTTCAACATTTGAAAAATTCATCAAAACTGATAAAAGCAAATTAGATCTCATAGTTATTGATGAATTGACATTGTTTCCAAATGGTTACCTGGATCTCCTCGTGTATGAATTGGCTGATGTCAATAGGCATTGTCAAATCATCCTTCTGTTTGATCCATTGCAAGCAAGATACCACAACAAAATGGATGAATCAATCCTGACATTTGAACATGACGTGGACAGGCTTATTGGTGGACAGAACATTGAGTACATTTACAGCACGCATCGGATGTCCAGATACTTCAATAGATTTTTTGATGTACCTTGCTTCAATCAGGCTGATAGAACAGAGGAACAAAGGTTGTGGATATTTGATGACGTTTACTCCATACCATCCATTTGCTCCGACCGTCAGGAACCATGTGATGTTCTTTTGGTTGAATCTGACCTTGAAAAGAAGGCATTTTCACCCATCATAAATGTTATGACATTTGGTGAATCCCAGGGACTCACATTTAATCATGTTTGTATTTTGCTGTCAGAGTCCAGTGCAGCTTCAAACGAATTTAGATGGATGGTGGCGCTGACGAGAGCAAGGACCAGGTTTTCACTCTGTTCAACCTTCTTAGGTGGAATTGAAGAATTTAAAGTCAAAAGGAAGGAAAGTCTCATCACATCCATACTCCAAGGCGAGAAGATCACATTCAACAGATTAAATCTGATGCTGAAATGCAATTTAATTAGGAGAGAAAAAGAAAATGGGTGCAGAGATGAGGTCGATAGGGAGGAAAGGTTGGAGGGTGACCCTTTCCTCAAACCATTTATCTTCTTGGGACAAAGAGTTGAGAAGGATGAAGATGAGGTAGAAGAAGTGAAGATCAGGGAACCAACCTGTCAAACTCATCTGTATATAACAGAGCCTAATTTTGGTTTGTGCTACAATTTCGACTTCATTAGGGAAAAAGAACAGCGGGAATACAGAGAGGATATGCTTGTAACTAACCAATTCTGTGACAGTTATGATAAGGTTCATATAAACGGCAAAAGAGAAACCCCTGGTCCCCTGCGATTCAAAGCGATTTATCCAAAGCACTCAGCCGATGATGACATGACGTTCTGGATGGCCGTCAGAAAAAGGCTTGTATTTAGAGAAGAGGAGGAGAATTATCAAAGGTTGTCAAGGGCGCATTTAGTTGGGGGTTTGCTATACACCAACTTCAAAAAAAAAATGGGCCTGGAATTTACGTTTGACCAAGGTCTACTGGAGGAAAGCATAAATGCATTTGAAAAGAAAAAGCTGGAAAAATCATGTGGCACAATTAAATCTCATAGCATAAGGTCGGACATTGATTGGGCGCTGAATGATGTATTTCTTTTCATGAAAAGCCAGTTATGCACCAAGTACGAAAAACAATTTGTTGATGCTAAAGCGGGTCAAACTCTTGCCTGTTTTCAGCACCTGATTTTGGTACAGTTCGCTCCATGGTGTAGATACCTAGAAACCCAGATCAGAAATCAGTTGCCTGAAGAAATTTACATTCACTCAAATAAAAATTTTGATGATTTGAATGCATGGGTCAAAAAATTTTTCCAGAGGGATATCTGTGTTGAGTCTGATTATGAAGCATTTGATGCAAGCCAGGATGAATACATATTATCCTTCGAGATTCATCTGATGAAAGATGCGCATTTTCCGCAGAAAATCATTGATGCATACATAGACCTTAAATGCAAATTGGGATGCAAATTGGGCCATTTTTCAATAATGAGATTTACAGGGGAATTTTGCACCTTCCTATTCAACACACTGGCCAATATGGCATTCACTATGTGTAGATACGAATGGAGGAGAGGACAACCAATTGCATTCGCAGGAGATGATATGTGTGCATTAAACAATTTGGCTGTTTGTCATGATTTCGATGACCTTTTTGAACTCATCAGCCTAAAAGCTAAGGTGGAAAGGACAGAAACCCCAATGTTTTGTGGATGGAGACTAACTCCATATGGGATTGTGAAGGAGCCTGAATTAGTCTATAATCGCTTTCAAGTGGCCATTGAAGAGGGAAAGGTCTTGGAGTGTCTGGAAAATTATGCAATCGAGGTTTCTTATGCCTACAGTTTAAGTGAGAGGCTGTATGAAGTTTTGAAAAGTGAAAGGCAAGTTCAGTATCATCAAGCTGTGGTTAGATTTATAGTCACGCACATTGACAAACTCAAAACAAAAGTGAGGGACCTTTTCTTAGAACAATCTTCCGACGAAGATATCTGA

SEQ ID NO: 539 - protein, 2127 aa, Apple latent spherical virus
GGACCCGAGCAAATGTATATACCAACTGCTCGATCTGAATCCTTTGGATCAGTCTGTCTTCTTGGGAAATGGACTGGCCCTAAGCCTTATTTTTTAGAGAATAGTTCTTTAACTCCCTCTCTAATTCATGACTGTATAGATATAGACATGACAACGGAGCCTGCTATTCTTTCTAAGAAAGATCCCAGACTTCAATACACTAACAATAAAGATTTTGATCCTTTTCTCTCAGGTATGGGAAAGTATGCTGTTGAGGCTCACTCCTTTGATGAAGATGAAGAATTGTTTGAGGATGCTCTAGATCGAGTTTTCTCAGAGATACCTATGTTTACCTGTGAAGATTTATCTAATGATCAGGTATGCAATGGTATAGAGGACGATGATTATGCTGAAGGATTGGTTATGCAGACTGCTGAAGGTTACCCCTTCTGCACTATGCGGCCCCCAGGAGTCACAGGAAAGACGTGGCTTTTTGCGGGATCACCAGGTGATTGGCACATAGTCCCCAATTCTCTTCTTGCTAACGAACTTAATGTCAAAGAGTTGAACCTTAGCAAGAATATTTTTGAACCAGTGATAGGTATAGATTTTCCCAAGGATGAGAAAGTTGATTCTTCTAAAGTGTACATAAAACAAAAAACTCGACTTTTTACTATCCTACCTGTTGATTATAATATTTTAGTTAGGAAATATTTTCTTTCTTTTGTTTCACAACTTATGGCCCTCCATAATGAAGTTCCTACAAAGGTAGGTATTGATCCAATTTCTAATGAATGGTCTATTCTTTGTCATTCTCTTCACTCAAAAGGAACCAATTGGTTCAACGGAGATTATTCCAGATTTGATGGAATAACACCTCGTAATGTGCTTCAGGGCATTGTGAAGAGAATTTCGCGTAGATATGCTAACAAGAGTTCTTTTGCTATAACAGATCCTACACTTTCTATCAATGGTGATCTTGCTAGATCCCTTTTGATGGATATGTGTAGCACTCGATATGGGCTAACTAATGGGGACCTTTGGTATGTCACTTCTGGTATACCTTCAGGATTTCCCTTAACCGTTATAGTTAATTCTTTAGTTAATTCTTTCTTTGTGCACTTTGCTTATATGAAGCTTCATTCTTCTGAAGTGCACAAGGCTTTGTATCCTCTTTATTCTTTTAGAACCCTTGTATCATATGCTGTTTATGGGGATGATAATCTAATTTCTGTACATGACACAATTAAAGATACTTTTAATTTAGTTACTATATCTAACTTATTGTTGGAGCATGGTGTGACTCTTAAGAATGGAGCCGATAAAAATGAGGAAATTTTATCTCCATTCTATCCTATAGAGAAGGTGGATTTTCTCAAGAGACGATTCACCACTTTACAAGGACATATTGTTGCTCCACTTAACACTGTTAATATAACTGAGCGCTTGCACTGGGTTCGTAAGGGCCTAGGTGATGCTGATGCCACACTTGAGAACTGTAAATCAGCTCTCTTTGAAGCTTTATTTCATGGAGAGCTGTATTACAATGATCTTCGAGGCAAAATTGAAAAAGCTTGTAAAGTGAAGGGCCTTCCTTTGATAGTCCCAGATTACCAAGACGCTCTTTCTTTATTTTTAACTGGAGGCTCATATGCTAAGGCTATTCAGGCTATAGCGATGAATCTCCCTGATAGAATCTCTCTGTACAAATCTGAATTCTATAGTGTACAAATATATCCTCAAATTTTTTATGTGACCAATGAGAGAAATGTCACACTTCAGAAATTGCTGGAGACCACTACTCTCCGTAACATTTGTTATGTTTCTAGGAACTACGAGTCTAGGAGCAGTTCTAGGGGTCTTTTCACTCTTAAGGGTGAAGGTTGGACTCCAGCTGCTTTGAAAGCTCGTCTTAGTGTGTACAAAGCTATGGCCAAACCTGTTTACTTCGTAGATGAGGCTAATGATGGTTTGGCTATGTTTTATTGCTTAGATTATGCTTTTCGTGTTTGTGGTTTAACCCGGAGTCAAATTGCAAAAATTCTTAATGCAGTTTTTGGTGGTAACCCCGAAGTCTGCCAAAGAATTTTCCAATTTTTCTCTCAAGTCGAGCCAACCAATAAGTACATTCCTCCCAATCAAAGGAGG

SEQ ID NO: 540 - protein, 6588 aa, Soybean latent spherical virus
ATGTCTTTCCATTGTCCAAGTTCTACTTGCCTTGGTTACACTCAATCTTTCTCTCGCCGTGATATGCGAGAGCAAGGGGATCGTTGTCCCCATGCTATGTGTGGTGCTCTTCTAGTGAAGAAGGTGCCCACTTTATCCCCACAGGGTGCCAGACCTGTGGTATCAAAGACCACTGTTGTGGTCCCTCCTCAAGCCACTGAGGAGGTTTTGTATTATGGGTGTGCCCCCAGACCCGCTTTTCTTGAAGCGGTTTTGGCGGCCCCAAAATTAAAGATGGCTCCACCAGTGGTGGATGCGATGGAAGTCGCATACCTCCGTGGTGTTGCAGCCATGGAAGCTGAGGAGAAGAAACTCCTCAGGAAAGAAAAGGCTGCAGTTGTGGCCCGTGCTAAGGCACGGCGAGCTGCAAGGAAGGCAGCCAAGAAGCAAGTTGCCGAGATGAAGGCAACTGTGGCCCTGAAATTGGCCACAAGGCAAAAAACTGCACGTTTGAGTGCAGCTAAGAGGGCCATGAAGGCCAAAAGAAAGGCAGCCAAGGAGGCTGCCAGGTTGGCGCTTGAAGAGCGCCGTGCTGCGGGTTTAACCCGCAAATCGGCCTTCAGGCGTAGCCTGAAAAAGAAAGCCACTAAGATGGCTGGTAGGAAGGTCCCTAAGACCTCCACTTCCACCTTTCCCAAGGTGGAATCTTTTTCTTGTTTTCCTTCTTCTCCCCTCCCTGCTTTTATTAGGGAGGAACAGCCCTGGGTGGCTGTGAATACCCCCTGCCCTCATCCTGAGGGCTTCGATTTGGCGGTTGATCCCGCCTTTGTGGCTCCTATTGTGGGGCCAATCGTTAGTGTGCCATTTATGGCACCTGTTGTGAAGGCTTTTAATAGCCTTGTAGAAATTTTGGCGGCTATCAATTATGAGGCCGCTGTAGATTTAAGAGCCTACATTTTAGAAATAGCTTCTTACGAAAATTTCTTTGCTTTACGGAGAATTTTTGTTGGAAAAGCTTTATCTTGGATGGCTCTTATCCTACCTCTTTATCCCTATGCGGGCATCTTTGATACTTATCTCCCACTTGATATGGTGGAAGATAAGAATTGTGATGCTTATTTAGCCTCATTACAGCAGACTGCAGTGATGGTGCTGGAAGTGACCCAGGGACCAATGGACGCACATTCTATCTTTGATATAGTGCGTTCCGTTGGTTCTAAGGTTGCTAGCATAAAGGACAAGGTAGTGGGATGTATAGTTGAGAAATCTGCTGCCCTGTTGGACACTGTTATAGACACAGCAAAGGGCATGTTTTTTGGAGTTCTTGGCCCATACCTTGCCCGCGCACAGAAGATCGGAGAGGAAATTAAAAAATTCTGGGATAACTGTGTCGAGTGGGCAACAAAATTGTGGCAAGGAGCTCATATAGCATTACAAGCTCTTGGCATTTATGCTGTTTGGGCTATAGTTGCTATGGTGCTTGTAGGAGTAATGTATATATTAGAAACAATTTTGATTTGTTTAGGTGTAATGAGTGGTCATGGTGTCCTTGTTGTTGCTTTGACAGGGGCAGTCATGACTTTTTTAGGTTTTACTGTTTTTCAGATGGGGCGTGAGTATATACATTTTTTGACCGCCCTACGTCAAATCATTTTCTTAGCAGTTATTCCCCAAGGAGGATTGACTCAAGTTAATATCATGGATTCGTCCGTTGATGTTACTGAGCCACACTCCTTGTTAGATACTGCTATGGCACCAGTTCATTTTTTGGAAACTGTTGCCAGTGGTTTAACATTCTTTTCTTCTACCTCTGTTACAGTCTTAGGTAAATTAGGAAATTCTCTGGAGGGAATTCGCAAAGGTTTTAATTGCCTACGCGATTTTACTTCCGTTTTGTTAGAACAATTTGGAAATGCTTTTGAATACATTTCCGGTAAGAGAACGTCTTTCTTCCGTGATCTTGCGTGTGCAGTTAAAGTAGATATCGCTCGATGGACCCAGGATGCACGGGAAACCATTGAGTATTTTGAAATTTCAGGTTCCCTTGATAGGTATGAGTATTATCGTGCTCGTGAGCTTATCTATCAAGGTCAAGATTTGATCGACACCGCCAACAAAGCTCGTAGTTCGCACACAAGTGTAAAATTCTTGCGAACTATTGGCAAGTTGGTTGAGGAACTAAAAGAAATTCGTGCTAAGTGTGCACGAAGTTTAAAATTCCCAGGATGGCGTCGACAGCCTTTTTGGGTATATTGTTTTGGTGAGAGTCAATGTGGCAAATCTACTTTGGCAAATTATTTGATGCCATTGTTGATGTCTCACATGGGTTGGGATCCTCAGGATGTTTACAGCAAGGATCCCGTTGATGGTTACTGGTCCGGATATTATCAGCAGAAGGGTTTAAAGATAAATGATTTATCTGCTGTTAATTCCAAAGATGTAGCGCCCCTCGAGCAGCAGTTGATACCATTGATATCCACTGAGGAGAAAATGGTGTCTTCGGCTGAAATTGAAGGAAAAGGAATGCAGTTTGCCTCTGAAATTGTAGTTTCTTCATCCAATTTTAATGATGCACCAACTGGTGCTGAAATTTTGGATGCAGATGCTTACAGACAGAGACGAAAGGTTTTGATGCGCTGCAGAAGGGCTGCTGAGTGGGTTCATAATGCTGATGGTACGCGCACAGAGAAGCTTGATGCTGAGGGCAAAATTGTATATAAGCCCTATGATCCATCCAATGCTTTATCTTGTACCGAGGTGCAATGGATTCATCCTGTTTCATTTACAGCTCTTCCCGGACCCTGTGGGCAGTGGCACTTAGCCGAGTTCACCATACCTATGGTGAAGGAGGCTATGGATGCCCACTTTTTGCAAGAAGAAACAAAGATGGCATCCTGGAAGTCGAGCCTTGGCATGAAGAGTCAAACAGCAAGGAAAATGGGTTCATACTTGCAGGATATGATTAAGGGTATTGGTAATTTTGTTACCCTTAAAGGAGCAAAAGATTCAGATCCTCGTTATTTGCTGGTAGCTGTTGATGGAAAATGCTATGCGTTAGACCAGCAAGGGAAAGCCACTCCTTATGAGGATTGTGATGTTGTTGAAGAAATTGAGCGGCTAACTTTGTTGCAATACCGCTCTTATTTCGCGGACTTGGTAATGGAACATGCTGACAATACATATTATCAAGATTCATTCCATTCATCAACAGTCCGAGATTTTTTGTTGGCTCTAATGAAAGATGGGTCAACTGTTTTGTCTGTGGATAGTCTGGGTAGTAGTACTCAGGACATTCACAAAGAATTATGGGCAGAATTGGGACTTTCAGAAAAGATTTTTCTGAGGGTTTCACAAATAGCTCGTAATCAATTGCGCGATGCTCCACATTTTAAGGAAGACGTTGCGCACAATTTTTTGGAAACTATGAGGCATCTTAGGGATGCTATTGTAGATAGAAAGGAACAAATTCTTTTATTTTTTGCAGCAGTAGCTTTAGTGGGCTTGTTTAGTTGGGGTTTTTTGAGCCTAATTAAACAATTTGCTTGTGGTTCTTTAGGATTTGGTGCTGGCATCGCATTGCGTGAGCAAATTGCTCATAGTAGTGTTATGTCTTCAGGTAGTGTGACTAGTGCCTTTGTTGCACGCAACATGCCAGTTGTATGGGGCAAAGCTGCTAGGTATGCCACTGCACACTCAAGCAAAGAAGAAGTGGGCGCCAATTTTGATTATTTTGAAGATGCTAGTGCTCATTTGTTAGCTCGTGTTGTTGGCTCATCTGGTCAGTCTGAGACCTGCCTTTTATTTGGTCATCAGGCTATTGCACTTTGTGCGCACCAGTTGAGATTGTTTCCTGACAATGACAGGGTGACTATCCATTATTTTTCAAAGGAGAGGCGCCCTGTTTGTTTTTCATTTACTTGGCATTATATTAATGCTATTGAGTGGCCTGACTGTGAAGTAATTGTATATAGAGATGCACAGCTCACGCCACTCCCTGTATATAGTGATGATAATTATTTGTGTGGGGAGCAAACATTGCCCACAGTTTTAACGATAACTGGGCTCTCAATTAAGAAGAAGAAATTCTTTGATGATTCCACGTTGTGCCCAAGCGAAAAAATTCTGGACGGTGAAATGCCCATCGTCCGGAGCTGGAAAGATACCGCTTCTCTGAGAACGCAAGTCCAGACAATTTTGTCCGAGACTCATAGAAGAGATATAAATAGGTATTATACTTCTAGTTACCCATCAGGGAAACATGATAGTGGAGGTATAATAACTGCAGTTATAAATGGGAAGCGTAAAGTGATAGGCATGCACTGTGCGGGGGCGCAAAATGGGAAAATTTATGTTAGTACCATTGGTCTTTTGCCCACCCGCAACATTAATGATGCACACTCTGCTGCCGATTATTTTGTTCCAAGTATTGGCAGGGAGGAAAAAGGATTTTGCAAGATTGGTTGGATTGCAGATCCTTCAAAGAGACCACATGCTGCCACTAAGACTGCATTGGCACCAGTTCCTAAGGAATTGGCTTTGCCATTGCCAGAGGGAGTGTCTGTAAAGATTCCTTCTATTTTAAGTGCAGCAGATCCACGCCTGCGTGATGAGGTGAATCCTGAATTTAAGGATTATGATCCTCTACGCGTAGGTATGGATAAATTTGCCAACCCCATGGATCCGCTTGATGATGAAGTTTTACAGCGGGTCTGTGAAGATATTTATGAAACCTGGTATGACTGTTTACCAATACTAGATGATGAGAAGGTCTTCTTGCAAAAGACCTCCTTGGAGGTGGCGTTGAACGGTATACCGGGTGAGGCTTGCTATGAAGCCATGAGGTTGGATACATCTGAGGGTTATCCTTTTGTTTTAGAAAGGAAACCAGGGGAGAGCGGCAAACTCAGTTATGTACATATTGATGAGAATGGCGTTCGTTCCCTTATTCCTGGTACATCGGTTTTTAGAGATTACCATGAATTGTCAGCAAGTATACTGACCCAAGTGCCTGTGTTGAATTGCATTGAATGTCCTAAAGATGAGTTGCTAAAACCATCTAAAGTTTTGGAGAAACCAGGCACACGGCTTTTCGATGTACTCCCCTTTACACATAATATTCTTTTGAGGGAGTATTTTTTAAATTTTTGTGTTTTTCTCCAACAAAATAGGGTGCATTTGCCCTGTTCTGTTGGTGTTAATCCATATTCTCGCGAGTGGACCTGGCTTTTTGATAGGTTGGCTGCGAAGAGTGATAAAGCTTTGAATTGTGATTATAGTAAATTTGATGGGCTTATATCACATCAAGTCTACATGCACATGGTTGCAACCATTAACCGACTCTTTAGAGATGGTGAGGAAGCAAATTGTGCGCGTAAGAACTTGTTTTTAATGTTTACATCACGCAGGAGCATCTGCTATGATCAGGTTTATATGGTCAAAGGTGGAATGCCTTCTGGATGCGCACTCACTGTAATTATTAATTCAATTTTGAATGAAATTTTAGTGCGCTATGTCTATAGAATAACCGTCCCAATGCCAGCCAAAAACTATTTTAATAAATACGTTGAATTGGTGGTATATGGTGATGATAATTTAATTGCCATACATGATGATGTGGTCTCTTTTTTTGATGGGCCCATTATTAAGGAAAAATTGGCAGAGGTTGGGGTGACCATTACGGATGGTACTGATAAATCATCACCCACCTTGTTACGCAAACCGCTGGAGTCTCTTGATTTTTTGAAGAGGGGCTTTAGGAAAATTGAAGGGGGAATGTATTCTTGCCCTCTGGATAAAGGGTCCCTTTACTCCCGGTTATATTACAGTGCTGGAGGTAAAGGGGGCCTTTTTCAACTTGATATCCTCCACGATAATGTTAAATCTTTCTTGGAGGAACTGACGCATCATGCTGATCATTATGAAGAGTTTCAAAGAGTGCGCAGTTTTTATATTAAGCGTATTCCTTCATGGTCAGCTACGCTGCCTACCTATGCTACATGTCTGAATATGATGGAGGGGCAGCGGAATTCAGCAACACCCTGGCAACCACATAAATTTATAGAAACGCGGCCTTCAGGTTGCGAAACTAAAATGATGGCGGGCCAGGATAATCATGCTCAGAAGATATGTGTAACTGAGCGTATAATTATATGTGGTGAAAAATATACGCCACCAATACTGGAGACCTCTTTTGTTGTTTCAATAGACAACCCCCTTTATATTGGTGAAAGGGGGGAGTATGTTAAAACAGAGTTTGGTTCAGGTATGGGGCGACTGCCTACTGATGCCTGGATCAAAGCTTTCTCCAGTCCCAAGAAGCACCCACAGCTTTTTGAAGCTTATAAGATGGGTGCTACTATATATTTTAGATCCTGCATGCCCTATTTAAATGCATGGTGTGCAGTGTGTAAGTTTGCATTGGCTCATGGAATCGATCAGAGTTCTATTATTGCTATGTATGAGTCATGCAAACCAAGAGGGGCGGGCGACATTGCTCCTCTTGTGGCCGTAAAGGCATACACTAAATTTGTGAACAGACCAGTGTTTAAATTTAAAGAGACTGTTCATAAGGAAGTGCTCGAAGCACACAATAGTGTGCGAGTCGCCTAA

SEQ ID NO: 541 - DNA, 7674 bp, Lolium latent virus
  source 1..7674: mol_type = other DNA
gaaaaccaaaccaaaccacaccagccaaaacggaccaacccagccacatctacggacttcgaacgcaaaagctagtagatatcccagatgacgactctggccctaaatttggcacagtacaacgaccccatcacaaaaggtatcatcgcacaagagtctctcagacgagtgcgacccgaccttaaagctgtggtcaatgtcaacccctacgccatcccgacttctgctgcactcgtactcgagaaattgggtattggaactcacccaatgtcactcgcagtacacccccacgcaccatgcaaggccattgagaaccagatactgaacacagtgggccatctcctaccaaaggagcagccagtcactttcatggccatgaaaaagagcaaactgaatatgcttcgacgccatccgtcaagggcggacacatttatcaaccccatctaccatcctagagataacgtccggtatggtctagatcctgaccctgatcaggatgcatcaataacagcaagttttctcgaggtgaagactagcacagcatttatgcaagatacactacactatttaacacctgaggatctgctggatatcttcgaaacttccccgaaactagagaacctcattgcatctttcgtactacccgtggaggccacacgcaacatgaagagcctataccccgacttatacagcatccattacacacatggcggctttcaatgggcaccctctgggcacctcggtgacgcatactttcatgaaccgtggcaactctactggctgagatgcggcagccttactcgactgatcgaggaagagacgaccaccactgtacaacccccccctggatttgaaggtgaagcttacaccagggtcaggaaggaagttcgagagctaaagatctacgcagaacgagtcacctcaattggggcccaccacctcttcatctttagccgaaacgccaaagcgacgcccagggtgaggtcctactcacagaacgggaaatgggtgacactgccgcgaatctttcgccccgtaagccacaacgttcagactccactcaagcaggaggtggccaactccctcatgctatacacatatgcagttaggccgtcccttaaagacgtcgctgctaaggtgcgccaaaaatttgatgagaaagacctggcagagcacagtcccttggagatcacacacctcatcaactacatatactacatcgaccagagggcatacctcactaatgacgatgacatcttgtcggacaaccttctgaagaggtggatcttcacacccatccaggcagcatacaagaaggccaaaggcttcctgctggggccggatgacttccaaaaattactcaaagccctggaatggcaacctgtcaccttcgactatgctgtggaccactacaagtcaaacccgtggaggatccacgccagcagaacaggcgctaagatgagacagctcaagaacttcctcagtcgaaccactggactctgtgaggcagttgaggatgatgcactggaaggaagtgaactactgaaggaactcgagggtaacatgtggttccgcaacccctccgaggtagagaaggaggttttcgatgcaatcgtagcagacctcccgccagatagccagagatcagagctaatcctcgaggacccaaacagcaatgcgagggactatctacctattcaacaggaccaaccatcggtgacgcaagggcctgatgaggcagcccaaactcaaaccccgacagccacaagcatggtcacaaatagtgtggcggcccgaatgccccctccagtcccaagaaccctaagggaacaccatgagcaattcccaaccaccgttagagcgtctttcgagcaaccaagcagcacgagagccccagaaacctccgaaaacaacacgcccgctgagtctgtgacgccatcaccaagggccatttatgttggggactttgctatcatggacgcaaatgctagcaccagccgcgccagctcaccttcccccagacgcactgtcgtgagcccccgacagcccgaggcccaaaacgaaacgctgggcagacagatagttagccgggttagcccagcccacgggtgccagatgagcccctacgccgcccagttggcacaccaactaagcgagcaaacggcctacacggatgttataggccaacgcatggttgcattctatagccaacacagtaggagctataaatatggtcggcacgaacaccgcagccaaagttggcttccagttatagatagccttcaggtcgctttggggcttgatgaaagttacgatcactgcctcatccaacgctaccgcaaacatgccagggtagggctgcatgcggatgatgaagaatgctatgagcctgattcaaccattgtaaccctcaacctctacggtaacgcagatttcttaatcgagaggaacacagacaaggcatctgaaactatcacgctccagcacaatgacatgctcttcatgccctcgggaatgcaggtcacacaccgccatgccgtctgcagcttgtatgaggggagagtcagcatcactttccgcaataagaccaaggactacctcaggaaaagcgcaccagatatgaacccggtagagcaaccaggggcctctgcaggacagctcaccggaccgttggaccacagaccagaggaactcccatgggagcattggatcccacgcctcaaccggctaggctttacaggcctacaaaaacaaacagaccctgaaggcaagcttatctaccccatcactgagataagacaggatatggtctatgtccctttcccgaattgctgccctgggccattgaggaaggaccttgaggccatgggccgtcgaccagtcaggtatacagttgatacgggccgcgcactcactctcgccagcgatatcaaaaataatcgtgtcggtgctctgttgcaaaatgctgatctaacgtggaagaccttactggtagagtactgcaggatggagcccacttcggtacccatgactgtaatccacggcgctggtggctcaggcaaatccaaactcctccaagaccacctcaacagggctgagctaaacgtggtgatcatcgtgccaaccagggtactacagcaggactggagaaacaaaatgactgagttcccgagcttcttggttcaaacctacgaggcggcgatgatggagtcagcaccccagatggtcgtctttgatgactacggcaaactacctcacggatacatcgaccttttctgccagttccaccctagcgtggagtatgtcattctcactggagatgcccgtcaatccacctactacgagtacaattcagacgctggcatccggaacctcccaacaaatattgaggtgttcaagcagtattgtggctactacataaactgcacacacagaaacaagcaagacctcgcaaacatgcttggggtttactctgaaaagatgggctcgacacacttcacctttggcaacacatgcgaaactggcagcctactgctagtaccttcagggactcagaagactgttatgggggaggctggccacaagactgagacttacgctgggtgccaaggcatcaccgctgataaggtccagattatgatcgaccatgacacccataaaagtgctgactcacacatgtacactgccctgtccagggcaactgagcatatccacttctacaactccatcgctggtctaaatactgcaagattccatgcgaagctaaatctcacaccatatcttaaaaccttcatccaagtcatcactgagcgggccgcagctgaaacagaacctgcagagtacacggtccaggcacctacagcgaggactcacatccctgtggaaaattgcagtacattcctagagaaagaccttgaagagcagagggccaaggaagaccgggaagtttacacacaggcaggcgccacaaatgtattccagaccaactcaccaatagtccaatgtttccaacaccaacagcccaaggatggagcgctaagtatcatcactcatgcaaaacgcctccagtatgcctccgctgaagccaaccaggctgagtatagagccaaactgcagattggcgccgcactctgggagaactttaagactgccatggaaatcccagacgagccagtaccattcatccgtgacctatgggaacagagcgaggccgaggtcctaagcacctatctatcaaagtctgaaatggccattaagaacgggaagaaccgccaagatccagattggcaggatgagaggatgtttgtctacctcaaggcgcaatgggttactaaggcaagcaagttcaacctcccaacagcgaaagcaggccagacaattagtgcgttcaaacaggcagttgttatgaagtttggagcaatggctcgctacctacgacgcataactccaaagcctgacaacattcgtatcaactgcgagatgcagcctcaggacatatccaagtgggcgctaggcctcgattcacacaatcgccccacgaaacagaaatggaactttgagagaccagcctttgcatctgattttgaggcctttgaccaatcccaggacggggccatgctccacttcgaggccctatgggcgaggcatttcaacgtcccaagctcactcatcgaagagtacctattcctcaaaatgcacgcccaagcaccgaagggctacctcacgatcatgcgtcttacaggggaggggccgacctttgatgcaaacacagcatgctccatagcctacaaccacaccagatacgagatacccaagagctgcatgcaactttacgctggtgacgacatgctacttgatcaagtcccagttgagaagactggcttcaagaacattgcggcaggccttaagctcacggccaaaaccgaaatcttcgaacagaagaggggaaagtggggagagttttgctcctggtggatgaccccctatggccttgtcaaggaccctatcacactgtaccaccggattctccttgcatcagaaattggtgatctctcaaagaaaattgatgcatacgccatcgaggctgagcctgcatatgcactccaaggacgcctcttcgattgctttaacgaggagcagatgaccgcacactatgggaccatcagacgcctcatcatcgaaggcaagaccaacttctccttagatgaccaagcaccccggcaccaggacctccagggcatcctcaactgcatggatgcaaagttcatgtaccattaacagcttttccttaactaacttctaactttggtcttttggtttttggttaggttacccactagtcgattaacatggaagacttctttaattgtttacggtcgagaggttttgagcgcactgatgaaccgctgcccagtgatagccgccgcatcgtggtccatggagtgggcgggagtgggaagacatcattaattgaagctttcgcgattgccaacgagtgggtacgcgcctacacgctcactagccacgaacggttcgacatatcgggccgtggaatcagccagtacaagggacaaccaatagatgagaagctctggaccatcttagacgagtacggccaaacagataaccccgaaaccctcccaccttttaacgtactcgcaaccgacccttaccaggctttccgctgccaaccgctaagggcccatttcgtgagcttacgatcataccgagtgccacaccacatagcgcaggccatcacccaatacactggcttccccattgaggcagctggtacagacctgcatgagggtaagtacaccgtaggcccttggacagacaaactaaggcagcaaatattggtcgaggacggtgaaatacactaccagctttcccggcgacagtgcccccacaagctcataaccgacgccatcggggaacagtggcccacagtcaccgtcgtgtttgaccgaagcattagccctgagagtgcgcgaccactcaggtgcctgttctacatagctgcaacgagatcctccaatgagctcaacatccgaacctacgtaccaactcgcacccccggactcattaaagcaagtctacctcacactagctgccggctttgctgtcggcctagggatcttccttctgagaactaacactctaccccataccggcgacaacatccaccatctcccacacggtggctgttaccgcgacggtaccaaatccattaggtataactcaccaggagtggcaacctccagtaacatcttcctacccgcagtagctgtcctctgtatcttagcacttcttcatgtccctttctttcagcctgatcgtgttcgccgtaggtgttgccgtttctattggtgtgctgaccctcaccacccaacagtctagcagctactgcttgattcttgttgacggggcaaaagccgtcgttgagggctgccaccttagacaggacatccccgccatcctaagtgagctcaagcccgcctcctcacctttcaaccctcttttctgtagttaggtttcctttagtttcaataattccattcttcgcttctctttccaagtttgctgttcgagtccttagttcctagcttatatgtcagaatccaaagcagagacgcctagcaaatcagctgagaagggtgtagcaagtctgagcaccagtgcaccccctagcagcaccacaccaacagcccaagccaaacaaacaccaccgcctgtggcaaccactgctagacccatggcatcacgcctgcccaggaccattgcggctgagggtggtggaactgaaaagaagcaatcccatcttgcggaggaccgcatcgcccaatacctcccaaaacaggatgcggtcgaccacagcaatctcgctgcactcctccaacctttcacagaggcaagctatgaacgcgagttcgatgttaaggtcaacggcattgccagcaaggccgaactcacggcggtggccgagacatgggcttcaagactcaacgtgccgaaagaaaactcagccgtcctcgctcaggagatagccatacactgctaccacaatggctcatctgaacagaccgacttcaacctcaagagcagccaggtcgcaggactgaatcttgaagctgctgtgggcgtaattaaagagatccttacactaagacagtttgcagcgtactatgcgacctttgtctggaactggggcattaagaatgaaataccaccagccaactgggtggccaagggatacactgatgagacgaaatacgccgcctttgacaccttcagctatgtaggttcaccccttgggctcaggatcacaccaacaaggaaaccaaccaacaacgagtatatggctgccagcgtgaacgccagggagaaaattatccaatccagggggaagggcatggtcaccaacagccccatgtttagcgatggcaccacccaccagggaataccgctgcaccccaaattaccactcagctaggcaccaaatgtcttccctccttggactctgcaaaggaggtgtgggcccacagccccgcccatggtgtgagaaaaccatggtttagttgtggcaccactggatgtatccagtacgcctgttttagcgacctaaatgctaataaggaccgaggggaggtacaccctcggttttgccgtcaaagc

SEQ ID NO: 542 - DNA, 9311 bp, Apricot latent virus
  source 1..9311: mol_type = other DNA
ggatacgcaaacaaactctgaacaagtaaattataaaggcaacttcataatttgcttgtgatggcacttctcaccagaactgctgcagaggaagtaatcgcatcattcacttcagaggaacaatcccgaatttcagctcaagctgtgctaactctggcaaatgtagaaaaggatagacatgatctattcaattatgcattgcctgaattggcaaaggtaaggctttacaattccggaatttacctcagtccacattcctacaaaccccattctcatcccgcatgcaaaactcttgaaaataacattcttttcaatatattacctagttatttggataattctttctatctagtcagcattaagaaaaataaggtcgactttttgaagagaaggcatcctgatcttcagatgatagagaccataaataggtacatatctagtttagataagataaggtatggtagcttttttcatgtcagtccttcaaaagttagtttgaaattcaagtgtgacaggcggactggttttgaaactgatgcatcgctggttgacttaattccaggttgcatggaaggtgctaggaaaaatttcttctttcatgatgaacttcattattggaggaaagaggctctgataacttttctagaccatgttaagccagaaattatgctagcatcaattgtgtatcctcctgaaatacttgctggggctaaagagagtctaaatccttggtgttacacattcaaaatcattgataaggatttagtgttctttcctgatggtgaagagtctgaagcttacattcagcctttgtcaggatcttacttgttaaagacaagtagaattgttactccctccggtcaggtcttcaatcttgatcttatcaaaagtagtttctcccatcacttgatatcaataactaaaggggaagctattggtcagaaaatgagattcttcaatggttttgaggctgtggctatgaagggccttaaccccctgaggcgtaaggttgaaagctgtctgccaatttccaagagtaccatacttaaaatttataggtacctgcgtacactgaagaagcctgatcttcaatcagcaatggctaaacttagccaggtttgcaaagacccaaatggttacgagatcaagttctttgaagagttctcaaaattgtgcctgaaatgtgatactctgaacacaaatatgctccctgacatgaagaggatcgtccaagggtttttcttgaagcttttcccaaaccctattgctagaaacttcaaggtcgttcaacaactccatttggacaacttcattgagaccttagaagatttcagcttctgtgttccaactgaggagctgactcttgactggaaagatgatttggaatttgtcaatttgacttttggtgaaaccgattttgatttagatgaatcctttgattccacttggggtgtgaaaaaagaccatgtcaacatcactgttgtacatcatgcaccatacttcatgtccaaatttgaagcttacgagtatcagtttcattccttactgaatgttgattcaacagctgctctaacaagatttgccaagatagttgtttcactctacagcgttagtcttgtggaatcttatgattgcaaatcattgtgcagcttggcatctgaagtaattgtttccgccaacctacgagcttgcttcacggttgttgacctgtggaaaacgttccgtgccattctgattaaggaggggaatcgatcaaagggtagaatgaggaaaaagtacttttttgaattgggtatcaagtggtttctgttcaccaatgctgcaaatgttaaattcctgactccaggccgagatgggttgtttgtgagatcgctcaactttgaccgattcattaagaattgtcagtgcaacctttcttttcatcgtggtagaatggctcttcatcagactattaaaggtgagaggctggagtcattattggatgagtacgagctcaactctcacaaaaaatttgtagagaagcaagatgtaaggactgttgaggagatagagaaggaacaagatccacacacctttgaaaatcacgagaactcctccccagcaactgtgggttgcagcttggttccctgtgcgtgctcaacaaactgcttcgtgcagaatgcaaaagtggatgctcttcataataatttgactttccatgacttcatagggggtgctcgtggtagaggggccactttcttctctagagatctgaagggttacagttacacaggtttcagtcatgaatctagagggtggcctcgcttccttgatgatttcttggatgataatatcatccctaagcatttttatgatcagtgtttagttcaggaatacagcactgggcatgggctggcaatgcatcgagatgatgaggaaatttatgacccaaatcaccaggtcctgactgttaactatagtggcagtgcaattttttgcattgattgtgatggaactgattttgaagttaaattaaatgggcctcaaatgcttctaatgccctttggcttccaaaaagatcataagcatgggattaagaatccctcaaagggtagaatttcattaaccttccgtctttctaggagtgcctccaaccaggtgcccgttcaggaagttgtaaaggttgatcaagatggtgccgtcaaaggagcttcacttgaaaaattgccaagccagcagactcaggatgaaagtatgctaggaacaggggttagctcagtgtttgatgagggtttttcagcagattcttctggcagctcaccagttcaagaattcatgatacaaatagattcatcactgttagagtatgcagacaaaagtctttcagggtcttcaaaggatcttatcaattgtgacttgtgtctttgtaacagcccttggttaaaaaatgaagagctcaaattctcggaggcacttagagatcttgcttttgcatcaggattcaatcctactgatagattttctctagccaaaggtgtgtcaggtgtccgaggaatgaatagaatcatctctgaattgccatcccacatttttccattgcgaggatcaatgagcattctagatatagatgacaaaactgttaaaggcaatgttaaggaaggctcattctctggctttagaaggtggaagattgttagctgttcaactgatttggtggtgattgccttcttaaaaccaaagatgacacaagggggtgaattaaggacccatgaggatgagtgtgagctttctgatctgactgaaaaactccatggctgctcagtgattttgagtaggaaattcgagcctgacttgtatcattcctttgatgttgatgctgatggtaattgtttctggcattctgtggggcctctaattggcgttgatggggagtgcataaaaaaaattctacatgatcaggcgaaaagagattgcgtcaagtgtccacgcctcagcaaacagcttgaaaataatgtctgggctgagagggaagctgttgcttatttttgctcccattatggaattaaattgaatgtgctctatgctagggaggagtgcacctggatattcaagccgcatgaggtacttaaggctgcaaccttaatttgtcaagacaatcatttcaagccttgcatgcctgtaaatggttgcgtcattagggccattgcttctgctttaaatcggagagaggttgatgttttggcagtccttggcaaacctgcacatgaagatttatttgatgaagtttctgaaggacggggcttcagtatctttgatctctccaggctctttgaaattttttctatttgcgggagtgtggatactggaggtgaattaatcatggttaatgaaggtgggaggatccctgctgaattctctttggaaaaagagcatctagcccacattcccactctttccaggagaaagtttagcccgatcgtgtcagacctaaatcgggtatcaaatagtgccatgagattccttgctatgaatggagctgagattgattataggccatccattgatcgagcttcaaccttgctggatagtttagagcttggtgcgacaggggttttgtgtcaaggtataaaagagactcagaagaacctatcatccatgcttgttccagaggctgtccatgacaggaagttggttatgatccttggaacttttggctgtggtaaaagttctcttttcaaaaaattcattgaaaaatcacccggaaaggcaatcacctttgtttctccaagaagatctcttgccgaatccatcaacaatgacttgggtctctctagggccggaggaaagaaaagtggaaagagtaaagatctcaagaatgtcagagtgaaaacttttgaactctttgtcctgcacttggatagtatcaaagagggccatacagttgtcattgatgagattcaactcttccctcctgggtatattgatttgataattcttgggttgaagcagaatgtcaatataataattgccggggatccctgtcaaagtgactatgatagtagttctgataggcatatttttgctggtagcgagagcgacattatgaggatattgagtggcaggacctataaatttaacattctgagtcaacgattcagaaatcctgttttcgttgggaggctgccatgcaatttgaataagtctcgactaactcttgatgaagaggaatacacactttgggaaagcattcaggaattctcaatgatggggcggaaggattgtccagttgttctggtttcaagctttgaggaaaaaaaaattattgcagcgcatcttggtcttaaaatgaagtgcatcacttatggtgagtcaactggtcttaattttcaaaagggggctattctcgtgacttatgagagtgctttaaccagcgaccgcaggtggtggactgctctatccaggtttagtcatgatattcattttataaatggaatgggggtcacttgggacaatgccttgacacattttgttggtaaacccctgcataagtttttaaccaagagagcttgcaatgatgacattattgatctgttacctggccgcccagagctgattgaaggttttcagagccaagttggggcagatgagggcgttcgagaggctaaactagttggagatccctggttaaagactaagatcttccttggccagtctccagactttgaattagatgattttgaagaggtccaagcagcggaggattggttcaagactcatgtgccaataatggggctcgaggctgttagggctcaatgggtcagcaggttgctagctaaggaggatcgagaattccgaattggggacatcaccacagaacagttcactgatgaacacagtaaaaatagggggcttgaactcaccaacgcagctgaaaggtatgaagccatttacccaagacataagggaactgataccgccacgttcttaatggctgtaaagaaaaggttaagcttctcctctccagctgctgaacatgccaaattgaggagggctcgcccctttggaaaatttctccttgatacctttttgaagagagtccctttggatcgcaagcatagcagtgaaatgatggaatttgctgttcatgcctttgaagagaaaaaactctcaaagagtatggccactattgagaaccattctggtcgttcctgtgaggattggccaatcgataaagctttgatattcatgaagtctcaattgtgcacgaaatttgacaacagattccgaagtgccaaggccggacaaactttagcttgctttcaacattctgtcttgtgcagatttgccccttatatgagatacatagaagcaaaagtggtggagtcactcccaaaaaatctctacattcactctgggaagaatattgatgatctggcatcctgggtcagaattcacaaattcaatggtgtgtgtacagaatctgactacgaggcttttgatgcatcacaggaccacttcattctggcctttgaattggaagtcatgaaatatcttggtttgccagcagatttgatttcagattacacattcatcaaaactcaccttgggtcaaaacttggtaattttgccataatgcgattcactggtgaagccagcacttttctattcaataccatggctaatatactattcacctttttgaggtatgaccttaacggaaaggaggcaatttgtttcgctggtgatgacatgtgtgcaaactcaaggctaaaaataaccaataaaaattccaagtttttggacaagattaaactgaaggccaaagtccagttcactgtaactccaacattctgtggttggggactttgcgagcatggggtttttaaaaagccggatttggttcttgaaagacttcaaattgcgagggagacccggaaccttgaaaattgcattgataattatgctattgaagtttcctgtgcctaccagatgggtgaaaatctgaatctctacctctcccctcatgagatggatgctcattacaactgtgtgaggttcatcattttgcacaatcaccttctgaaatcaaacataaaagatctctttagaggtgagccaaccattgtcactctttaattaacctactagtagatttagtttaaagcgtattaggttaagctaattagtattaataatggaaactgtgctaagtttgttgaatgaattcggatttgagcgtactgttgagcccttgagtgatcccattgttgtgcatgctgttcctggttctggaaagacaactttaataaagcaggccttgataaggaaccataatattgaggctgtgacttttggagttccggaaaaagcgaacattcacggcacttatatcaaaaaggccaggcagggtcaaagaggtaggggcaacttcagcattttggacgagtacctatcgggtgaatactcaactggtttcaattgcttgttttctgatccctaccaaaatcacggtgattgccttcgcgcccacttcattggtcgttgctcacatagatttggtaatcaaactgtgcaggtgctgcgaaatttgggttacaatattgccagtagcaaagaagacatagttgagaagaagaatatctttaggcttgtggaacctgaaggtgcgataatttgtcttgaaaaggaggttgaggactttcttgcttggcaccacgttgaatacaaattgccttgccaagttcgtggtgccacttttgatactgtgaccttcatccacgagaagcctcttgaggaattggttggtcctgattggtacgttgcgctgactagacacaggcacaaattggtgcttgtctcgaattagtatgcctttttcccaacctcctgattactctaagagtgtttttccaatagctataggtgcagctgttgctctggttctattcactttgactcggagtactttaccacaggtaggtgataacattcacaatttgcctcatggtggtaactatcaggacggaactaagagaatcagttactgcggtcctaaaaactcctttccaagcagttctttaatatccagtggcacgcctatgatcatcatagtcattctcctgactgcagctatctatgtatccgagaggtggtttggctcagggcatcgtcgctgcagttgttgtttacctggtgctcctgcttgcacagcaactaatcatgagtagagcaaattcatgcacaattgtaataactggggagtcagtttccattgtaggttgtacttattctgatgctttcatagaattggtgaagggccttaagccttattatcacccattaggttagggtgtggcggattaatattaaatagaagtttgtgtgtaatcaatttcaattttaaatttaatagtctaagttccagttcccgactatggcaacaagcgggcaagacacaacaagtgccaatccagctgtgaccagaaatgaagaaacgccagtggtaacagaggttcaagctactaatgctgtagccaccactcctgaagtagtacctgttgctactgctccactgcctgcgtccacgcagccgactgctacgacgtccagctttgaggtctccttcactcctgctacctcaatttccgcgactcctatgacgtttcctgagcctgttgtatcacagttggtgccttttccacctttagttgcaactggccaaagctcagtgcaaacaactgctgttcctgacacttcaaggctgcagcagatggccgctgcaaataggggctttagtgagggtctcagagtgcacccactacccataactccggcaagctcaaatcctttcacaactgggaatatttttaccagctctgtattctctgggcgaggttctaacgccgctacatcttcagaagctattggagaacctactcctcagagggtgtttcaatcatcacagggttcaaatcctcctgctcagggtcattattcacaacaacacacatctggtagtgttgggaatgtgatcacccccttcactcttggaaatagagccccaagaagggcagcttcatcaatagggggaactagaaggaggctggattcagttggactcaagagtataatgtacgaacctcaagctggtgtggttgccactgacgcaaagatgagagccattggtagagccctcatagagatgggaatcagggaggatcagctcactgaagttggggtttacctcgccaggcactgtgcagacgttggcgcttctgataaatccactctcttgggtacttttcctgggtctgatataacgctggaagaggttggtacgaggatcaagcagactgaaggttgcaccctcaggcaatactgtgcgtactatgcgaagcatgtttggaatctaatgcttcaaactcagaaaccaccagcaaactgggttgggaaggagtttaaatttgaaacaagatatgcagctttcgacttcttctttggagttgagagttctgctgctttggagccagctgatggtttgataaggctcccgacccaatctgagagggttgcgaacaacaccagcaaagaaatacagatgtaccgcatcagatcgatggaggggactcaagccgtgaactttggggaagtcactggcggcaaaataggaccaaagcctgttttgtcaataaagaaataaggtcgtgcgtcttgctttcagtttctccagtatttatgcttttaaataaagttgatcccaacctaatcgggacggcagagtgtgttttatttcaatttcctactttgcttatttttgttttaactagattttc

SEQ ID NO: 543 - DNA, 7462 bp, Vanilla latent virus
  source 1..7462: mol_type = other DNA
ggaaaacaaaccaaaccaaatctcactcaaacaaacacaagccaatcaccatcgtctgtgataaggaaactcagcaaagccctgtacactactttggtaatggctacttcagtgagaaaactcttagatcaagtatcagacccttccaccaaagcagcttattccgagctgtgcttcaaacatgcccgtgatgcagccaccaaagcttcagccatagcacctttcgctgtctctgattctgaagcccttggactggaacgtatgggcatcactacctccccatttgctaccacatcccacacacatgctgcagacaagattattgaaaatgactgcctcagcatcatcggccactacttaccgaaaaacccagtcacactaatccagctcaaaaggagcaagttacatctattgggcagaggagctaattcagatcattttgccaactatagctacgaacccaaagacgtactaaggtatggcacagcaaatcctcattattgccccaaggttaccactgaatatgctgtgttggccgacacactgcacttcatgagcccacatcaactggtaaccctattccttaaaaattcaaaattacagatgctctttgccacactcgtactaccaatagaagcattgcacaaactaccaagtctcttcccagaaatataccgcttagagtatctcaaagatcattttgtatatatgccaggcggacatggcggagccgcatacgttcattcttatcacacattgcaatggcttagtaccgcccaaattggaacacacaccaataatatcctatcaatcggttccacagactttataacattggaaaagatagagacaaaagcagcacaccatatcatggtcgtgcagagaaggagaagtgccattccatggcctgtgccaccaatttgggtcttccacgcttcagatatggtcaaactgccacacattttctacccagctgaagccaacgtccaaaatgcatacccaaatacacttatcaaacgaatgcaagcgtattgcttctcagttaaagcagtatcactgcgagacatttttgctaagctgagacaagtcttagaaacctcagatttgcaaaaatactcaatgccagatttagtgcgacttgctaactacttgttgtttacgacgggcatgcaacaagtcagtgactacgactcattcctcacaaagggatggttagcccgtctgagttcccgaatccaaatgagaataaggcagatgctgcaaaacgtagtgggacaatcctcatacgcagcattactaagcgtattagatactatacccatgccattcattaccaagcccagggcagtacccgcagtaggtccagaatggttccatgaggagtacactgaaggaaaacctgagcatgacggtccagaaaactgctcacttgaagatatagaaatgctagctgagttggatcagactttaacaccccacactcaaactgaaacgaaggagccacaaagcccaaacggtcaaatcacaaaccaaaatacaaactcagctgcaacctcctcaaaaagaacaaattcagagaactcctcagaatcgcaaaggagagaattattcgacgaggaacaactaatagctgaaatgtgggcagaaattgaaactgtaccagacttaggatccagctccaaaattgaatcaagcataataaagacacccaccgaaaatggtggtgaacaaatgcccacttcagacttcgattcaaggactacagaaatactcaggatccatgggttcacagctctcaaacaacaaagtgacggaatctccccaatcatgccagtgtacttcaatgacaaaactgaccaactctgcaaatccaaaatccaaacgggatgccccttcatgagcatggctacagacattaaaagacatttctatgactacactattgacaatagaagaggacaagcttacatgtcagacgtcaagaacaaccttactggattagttctgcccaaattgtctagagaaacactccaagcgtgggtatctctcgcagaaaattcgaaacgcaccatacctctccttgtcatacatggtgcgggcggagctggaaagagccaaaaacttcaggagacactcagagctatcggagcagcaacagaagatgtcaatataatcctaccaactgtcaatcttctcaaagactggaaagacaaaatgaatcaaatggacacacgaaggttcatgactttcgagaaggcctttgaacgagaaggaaatcgaattgtcatctttgacgactatggcaaattaccagcaggtctcatagacgcctacctcagtatcaagcccacagtcagcatggttatcttaacaggagaccaacgccaatcgacataccacagcgctaataaagagtcgcaaagcgctcaactgcccactaacatagcccacttccgcaaatactgcgattattacatcaacgcaactcataggcaaccaaaacgattggctaatccaatccgagtccacgctcagagactacatggaggaagcgtgaagaaagaaaatctgatcaaaaatggacaaactgtcctagtgcccgcccaccgtacccaaatatcacttactgacttaggccgtccatctctcacatactctggatgccagggcctcaccctcccccacattaccattgcactagacagtgatacccctttatgctccgacgaagttctttacactgccttctcaagggcctcagagagcattaccttcgtcaatacctattcagagaatcctgactttttagcaaagttagacgcaaccccatacctcaaaactttgctatcaggagttagagaagacgaagaagctggttcagacttgaaaccggcagaacccgaagttcgcgaaccacaaatcaaaactcatctcccagtaaccaacactgacactttcttggaaagtaaagtggagaagacagaagataaggacactcgagaactttgggatgggtcagagaaaactaatctcgcccaaacacaagaccctgtaatccaaatgtttccccatcaacaggctaaagatgaagccctcttcaagctcactattcaacagagaattaaaactgcatcgcctgaagaaaatcgtaaggagttgagtcagacaatcaatgttggcaacttgctatttgaagcttacgcagactttatgaaagtacccaaagaaccccaaccatttgataaagcactttggattaattgtctgcaaacagcgcaacgaacttacttgagcaaacctactgccaacctccagcaaggagctaaccgacaagaccccgattttccagacaatgcaattgccttgttcaacaagtctcagtgggtcaagaagatggagaaagtgggcttcaaatttaaagcgggccaaaccatttcggccttcaaacaacaaacagttctcataaccacaactatggccttataccttcgcagacaacgtgaaagacaccaacctggtaacatattcatcatgtgtgagaaaacaccagaccaattcaatgacttcgtgatgaacaactggaattttgacaggccctcctacacctccgattactcacaatatgaccaaagtcaaaacgggcctttcctcaattttgaactcagaaaagctcggcatttcggagtgccagatgaggtattagaattttaccaacacgtcaaatgctacgcccaaacattcgttggtaatttagccatcatgaggctaagtggagaaggcccaacttttgatgccaatactgagtgcaacattgcatatgacgcactcagatttcaactcaatgaccaggttaatgcatgctatgcaggtgatgacctggtcagagatcaggtgtgtccagagaggtcttgctggaaatactgccatgagaaattcaatctggtagcaaaacccctcgcaactaacaagccggatttctgcggatacagacttacaaagtacggcatagttaaatcgccaatacaactgtaccaaagcttagagttagccatccggctaggcaaaactgaagaggtgaagaggagctacgcaattgactatttacaagcatatcgtctaggagacaaactcttcgaaatttttgacgagaaagaaatggaagctcatcaactcaccacgcgagttctcacaaagaaaggaatgaaggctccgtcagaaggggatcacatgccctcgtttcacataacatctgaccgcctcattcgcaatccccactatgctgaaatgcaggacacacagtcacacagaatttatacggaaaaaccaaatttcgtagagaatcacttcacttaacaccacaataaactttaacttatactaacattagtcttagttaagtttgaatttagtttgaatatgaagatactagaactagaagccttgctactaacagctggatttattagaacgaacctgcccctacaaagcccaatcaccattcacggagtgcccggttctggcaagagcacaataataaagaagctgatacaacgacaagacgtaatcgcctatacgttgggagcaccttacggtaaagatttaagccaaccaggcgtactaccttacacggaagcgacacctaagaccacaaaatttgtgatactcgacgaataccaactcgacctgaatatcaccacagaaggaatctcagcaatctttggtgatccataccaagggaatacggacagacctgcacactacatctctataatatcacaccgagtcccaaagccagtcaccgatttcctcacgacccttgattttgaaatccaatcctttaaaccgggcaccctcactacagtacatccatataaagcgacacaattccagatcacacctgaaatacctgtgatccatatagccgaaattagccaagctcttctcagttcacattcagtccactcacacagtccgcaggaagtgagcggcctcgagtttgacgtcgtagttgttgtattccactcatcagaacttagacacaggagcagactgtacattgcttgtacccgagcaaagagacacctgcatttgatatcagacaaattcgatgagttttgcaccacctcctgatcattctaagacatacacagcattggctataggagcaggggctgccgttatactatttgttcttcgacaaaacacactgccacacgtcggagataatattcatcacctgccccacggaggctgctaccaagacggcaacaaacgaataacatacggaagactaggaaacacatccacccactcgtggcatgtcctactccttatcttcctactttcagccgcaatatatattagtagccatcgtcgctttagggttgagctacactgcgctcactgtcacaggtaactttcttaaaccagctaactgtataatagaaataacagggcattcagtagtagtatctaactgtccaactgaccaaataccacacttagcaaaacttgttgaaagcttcgcctggagtagtcatggccttcattgactcggcaacctttcacgaatgtcatcgtaacatcttcagatgggtgagtgatgttggcacacaggttcggcaagcccacaatggaatcattaacgatctccagaaccgaccaacactggaaacactacgagagtcattccgagtcccaaccgctatgctgcaagaaattcaaaatgacgtctcagctcaaacctcactcatcagcaattctgtaatcaacacactacaaacagttacccaagcacttgaacagatagttgcacctacatctaacattgctgaacgaactttcacaagatttataccacccactcaagtacctatgccagagttgcaattggacataaacacacttgcaggatcagttcagtcagctcacatgaacctacttgagtggattatgcacaatgctagagccattgatcaattgcaaaacacaatccaaaacttatcgatcggcactagaaatgtcgttatcacagctcaaaaccaaatcaatcagaagctggataacgacaagagcacactaatcgagaaagttgactccctccaacatttgttgcacgagttaaaacaggaagcaaaccaacaatttaacggacaagctttggaggacattcagtcaaagttggaagcaatacgtctgttcatcaccagtgaaattccaacaaaccacggccaactcatcaacctacttcacgaactgcaaggcaaccaagcttccacccctgcccaaaacaatcttgcactatatgaagcgcagcaccccaccataaaccccaggacacatgggcgacttgaactcgacgaatcatacattcgaatacccatggatgtacttcaaagaccaccatcaacgacactcaacctcaagatagaagttcatccaaaacaaacaaaaactgaggtgcgatacacccttcatgacgaatttgagctggtattcattaaaagcctatctacaccctatcgaatggaggaattaccagacgacgccctatcactactacactgccactgtcctaggtttatttacaaactaacacaaaataatttgtgttaagtttgaactaagtgtgaaataatatacaatggacactagtactactaacataggaactggctcaagcagtcagaaaaatccactgacaaaagatcaaccaccaccacccactgcccaggacgcgggggaaacggacagtcttatgccaacactacaagagctcgaggccataatgccaacaattgcggccaacaaggtggccacacgacctatgataacagcaatccttacacaagtgcgaggtcaacacgcttctgccacagctaccgacctggtcgaactagcaatcaactgcatgcacaacggatcatctcgactgaccatggttgatggggcaacatcaaagagtattcctttcacaacaattgtcgatgccatcaaacagcaatgcacgctacgacaattttgcatgtactacgcaaaggtctgttacaacatcgcccgagagcggaagattccaccagctaactggctagcaaagggctattcagaagataccaaatatgccgcatttgacttcttcgccggcgtgatgaaccctgcttcaccatcaccacccggcggaatgaagtacacaccatcacccgctgaaatggcagccagtgctgtaaatggccaaatggccattcttgaagcccgacaacaggaggaccaatactccacacgaggaaacatgttggctatgaggcaagtccgagcaaccccacgcccacccatgatcaccttcgaatagtaataatagcgccttgcgcccagactcgttgtttcgcgatttgttggagtttgcgtatttcaaatcgcttctgttggttaacttaataacttaggaattgtgtctaagggacac

SEQ ID NO: 544 - DNA, 7760 bp, Wineberry latent virus
  source 1..7760: mol_type = other DNA
gaaaactccaccacacaacacgaacgcacacggcacgaccctagtttgacctctgtgataaggaaactcagcaaagccctgaacacagcagcatactatggctacccaagtgcgaagacttctcgaccaagtctcagacccatccacaaaagcagcatactccgagctatgcttctccagagctaaggacgcagctgccaaggcagccaccctagccccttttgcagtctcagatgcagaagctgtaacactggagcggctcggaataaccacttctccattcgccacaacctcccacacccacgcggcagacaagatattagagaatgattgtctagcgctcataggccactatctgccgaaagacccggtgaccttcattcaactcaagcgatctaagctgcacctactccaccggggacccgaccaagacgttctcacaaactactgccatgaacccaaggacgtcttgcggtacgggatcactaatccgcactcatgccctagaatccaaacgcaatacgcagtcctagctgacacactacattttatgtccacgatgcaactcgctgttctgttcaataagaaccccacactggacagactatttgcgacgctagttctgcccattgaggccctccacaaactcccatctttatttccggaggtctaccgactggagtattatgagaaccacttcgcatacatgcccggcggccacggtggtggtgcatacgtgcactcttacgccacactcaaatggctgtccaccggccaagtgggtactcacggacccgggctcatatcatttggcatcactgactatctgagcttagaaaagatagaaaccaaggccgcgcaccatgtgatgctgatccagagacgtcgcgccaaagtcccgtggcctctaccaccagtatgggtcttccaggcgtctgattatgtgcgcttacctcacatattctacccaccagaagctaacgtacgcaatacataccaagatgtcttcgtcaaaagattgcaggcgtactgcttctccgtcaaggcggtatctctccgggacatctttgcaaagatccgccaagtagtggaaactcaggagttgcggcggtattcaatggctgaccttatccgactagccaacttcctgctgttcaccactgcaatgcagcaggtgtgtgactaccaatcattcctcacgaaaggattcctagcccgactgagcgccagaatccaagctcgtatccgatctctcaccgagggtttcatgggccagtcctcttacgcagctctgttgagtgtggccgacaccatcccggtacccttcaccaccaaacccatatccaggccagcccaaggggaagattggtaccgcaaccctgaagagcaagatgaggggcccgaagaagaagaccacccagctagcccctccctggaggaccttgacctgctagcggagctttgggaaaatccaccccacaatgcggtggcgagagaaaacccggacaaagccacgagcccaacacctaccacccacaaggaggagcctgcagctgagaaagaaccgaatagaggcaaacggccactactggaacatttgcctgacacccgggacgcgccagatatcaccctcgacgagctggaagcgatgctcgaagactgcccggcgaagccaaaacccgggactatcgttggtcaccatatgtctgaccgagtttacataccacacggtgaggggccgagcgccaccacgcctcccattcaacccagcacctgctcaacaggccagacaatcagcgaccacatccaatttggcaccgtcggagaagatgatctgcctgaggacactactacaagccacctgagcacaacccagattgagccaccaaccccagtgcaaagccaccaaaagagatgcccggacagcccatcagagcataaaccaacgcttacaagcggtctacggaaccaggggcaggaaaaggcggccagtagattacccgtacggaccatcgagatccttaagctgcatggcttcacaaattttaatcagcagcactcagatgtggggcctatcgacccagtgatctacaacccaaacgctcacaacctgcaactcgctccccccccactttcaaagctcaaccgcgttttagacgccatggctggccgtttgcaaagacatttctacacctacacgctggacaacaagcgcgccacagcctacatgtctgacgttaaaaacaatctgactggtttagtcttgcccaaattagacaggaacactttgtcagcgtgggtgtcattagcagagtgctccaagagaaccgttagcgtgctagtcatacatggagctggtggcgccggaaagagccgcgcgatccaagagatgctgcgcaaccacggcgatgtggccgacaaaaccaacgttgttgtgcccacggttaacctggtactggattggaaggctaaattgccgggagtggacccaaagagattcatgaccttcgagaaggcgtgcgaacgggaaggaaaagaggttgcaatttttgatgattatgggaaactacccgccggctacatagacgcgtatctaagcatcaaaccaaccgtggaaaccatcatcctaaccggcgaccagcgccagtcggtccaccacgccaccaatcgagaagctcaaactgcaaacctcaagaccaacgtccagcacttcagcaaatactgcgactactacgtgaacgccacccaccggcagcctcagcggttggctaaccccatccaagtgcacgctgaacggaaagtcggaggcgctgtgcacagagccaacctcattccggacaccgcaacggtcctagtaccctcattcaccacccagcagtctctgaacgggctaggccgcaaagctttaacatattcaggttgccaagggctcacgctgccgcacgtcactgttgtgctggacaacgacactccgctgtgttccaatgaggtgctctacacggctttctcccgagcctccgaatctatcaccttcgtcaacactcactcggaccaccccgatttcttagcaaaactggacgccaccccttacctcaaaactttgctgagcggcgtccgtgaagatgagcaggcaggcaaagatgacccgttaccaaaacctgaagttcgtgagcccatgattaaaacccacctgcccgtcgccaatctcgagacatacctggaagacaaggtggaacaagtagaagataaagacaccagagaactctgggacggccgggagaagaccaatctaatgcagactcaagatcccgtggttcaacttttcccccaccaacaggctaaggatgaggctctcttcaaactcaccatcgagcagcgaattcgcactgctagcccagcggaaaacgtgaaggcagtgcaacacactctccaagcgggagacctcctctttgaggcctactctgatttcatgcacgtacccaaggaacaacaagctttcaatccggacttgtgggaacactgcaaacagttggctcttagaacgtatgtcagcaagccgcgcaacaatctggagcagggcaagacgaggcaagacccagactttccagaaaacgccatagccctgttcaataagtcgcaatgggtcaagaagctggagaaagttggattcaaatttaaagcaggccaaaccatctcagccttcaagcaaagcacggtcctgctcaccaccaccatggctctgtacctaagaaagaaacgcctggaacatcagccccaaaatgtgttcatcatgtgtgaaaagacacccgctgatttcaacgacttcgtgctgaatcgttgggattttaagacgccatcctacacttcagactacacccagtatgaccaatcccaagacgcggctttcctcaatttcgagttacgtaaggctagacacctgggcgtacctgacgaagttttggacttctacaaatttatcaagatccatgctaggactttcgttgggaatctcgccatcatgagactcagtggggaagggcccaccttcgacgctaacacggagtgcaacattgcctacgacgccctcaggttcaagctcagtcccaacgtcaacgcatgctatgccggagatgacctagtgcgggaccaagtctgcgatgagagaccagggtggcaactcagcaaacatctgttcacactacaagccacgccactcaccaccaccaccccagatttctgtggatggcggctgacaccacacggcatcgtcaagtccccaatccaactctaccaatctctacaactggccttgagactgaacaagatggaggaagtaaagcgctcatacgccatagattacagctacgcttacaagctaggcgacaaattgcatgaagtgttcaatgaacaagagttagatgcgcatcaactaaccaccagaatattcgtcaagaaaggccttaaaattccggagactggggaccacctaccacaattcaacgttgtgtcagatagactcatcacgaacccacactacaaggagatgcatgactcaacctcggaccgtatcttgctttcagaatttgagattcaagaggactacgtgcccgactacattccaagaatcatccaaaactgagtctgcgcacgggccgttgagtagcttatgtttagccttattctgaagatgaaactcaacgagctcgatttcctgctgacgtcacagggttttgaacgcactaaccaaccactcacctttccacttgtcatccacggggtccctggctgcggaaagagcaccatcatcaaggcacttctgctcgatattcacacaactgctcgcacctgcggcaccccatacggcagcaatctacaacatcctggtgttcaggccttcgacaaccaccccgtcgccccgtccatcgaccggagaattctcgacgagtatcaactagcggacaaccagaaggtcgcagctttcaacatcctcttcggagacccctaccaaggtagtttccggctcgccgcccactacatcaaaaccttatcgcaccgcgtgccaaaaccagtttgtgacttcctacaacaacgagggtttgacatcactggggggagaccaggcgcactcatcaccacccatccttactcccagcagctcaaagacaccgcttggctgaaacacaccatcttacacctcggttcggcatcggctgctctcactcactctcacgcaatctgcagccggagctccgcggaagtccaaggcctcgagttcgaacacgtgactctaatttaccactccagcgaaaagcctcaaacagctgccttttacgtgtgctgcactcgagcctccaagtctctcactctcatctccgacgacttccatgagtttcacaccgccacctgacttcagcaaagtttacctagctgctgtcgccggggtttgcgccactctcgccattcacacagccacccgagatacaagaccgcacgttggggacaacatccaccatttgccgcacggcggccattatcaagacggcaacaaacgaatcgtgtacgcaggctcacacttcacaaaccaaactcaaactggcgaccactgggccgcagtcttcgtggctgtcctcatcattgccatacttattagtgagcgttgctttcgccctgctaaccgcgcttgccctcaccaccattaaaccggcgaagcccgcgtgcctgatcaccgtgaccggccattccgtctccgtggagggttgtgtcggcgtcaacgttgccgaaattatccaaagcttcgcctggagtcgccatggcgccacttacccttgatgccttcacgcaatcacacgacaccatcctcagggcaattgagagagtccacaataacaccatagttccgttggcccgcactgccaacagtcttggaaaccaactcacacagggactacgcgatctgaacaccaagttggacgtaattaccagtcaaacggcctccaccacagcaccgactgttggtgatgcacgccagatcccaatcgagggcccgactagccccaccgctactggtaatcctctcatacagcacatcccatctgccacacgattcttttcagactcagcagctgtacacgccgagacactgcgcctcacccaaattctgcccgccaacacctttccgattcagccaagctctctgcccactgaggagctcttcggtcaactgcatgcactacatcaaaacttactccaatggagtattgacatagataacagagtgcaacagcttgcagcctcgctcaacgccaaactggacgctgccacattcaacaacgctaatcaagtctcgacggcgacgatcagccgtctgcttgaggagctcagggctagtgtggctactactcaacgcactgatgaagctacccaagctatgctcacaaaactagcagacatccagagccgcctcccagccacaccaccatctgacacactgcagcagctcatacagcttttagcgaccggacgccccgcggaagggtcaaattcagctaatggcgccaactcaaatttgcccatcttaacgcccgtgcacaacgcacttcgatgtcgcgcatacggcaacgttgagctcaatggccaaaccttcaagcgacccatagatttcacgggaaggccgccatccacaaccctttacctccgcctggacattaaccgtgcagcagaccacacagcagtgaatttcacactgaatgatcttgaccgagtgctgctcgaggaaactgtacgaacaccgcatcagctgcaacacctaccggacgacgcactattcctcatcaacctccactgcccccgcttcacgtaccgacgtgaagcgggttgttaagttgttccaaagtctgaatcaccaactaacaactccatttaccatctgttcatacaccatgcctgacacaccagctaaccctccagctaaccaagcgccgaaccccgtgaacgcaccaaatcctcccccaccgccaccgcgcaatcccacctctggcggcgggtcagccaatccgctcattccggccgatgacgagctcgccacccttggcagcacggtccaagccaacaaggtagccacccaagaagcagttgccgccgttcttgcggaagtgcagcagggctttccaaatgccaccgcgctagaccttgtttccttggcctgggcctgctaccacaacggttcctccaggtacgttaccctggagggcaattcagctcacggcatcccactggccagcatcaaggacgtggtcgagaaccactgcacactgcggcagttctgcatgtactacgccaaggtttgctacaacaagggccgcaacgacaaagtcccacctgccaattgggccgccaagggtttcaaggccgaaagcatgtacgccgcgttcgacttcttcaatggggtcctgaacgaggctgtccccaaaccgcgcactggcatgaagtttgtgcctactgaggccgagaaggcggcgcacgcggtgaatgccatcatggcgatcactgagtcgcgccagcaagccaaccaattctccaaccggggcaacatgctagctatgcagcagatccgcacaccagcaccaccacctctcatcacttttgataattaagccaaccggccgccccattgttttcgcgattttgttaggggttcaaatcttcaaaatcgcttccgcaacttaattcggtaatttgtttcagggttctacgtaaccccc

SEQ ID NO: 545 - DNA, 7408 bp, Ambrosia asymptomatic virus 1
  source 1..7408: mol_type = other DNA
catacactcacagaccttcattttcagcagcttcgaacacacaagtagatactgctaccatgtctcaggtcagagccaccctagattccttaaatgacatcacagtccgttcgaatattcaacagacttatgcagaagggattaaaagagagttcaaagcggctgctagaatcagccattacaatatgcccatagaagcagccaccaaactagagtccttcggcatcatcacgaacccctactccatagctctacattcccacgcagcggccaaggtgtgtgaaaacaagcttctggacaccgtgggccatattctgccaaaggaaagggtcaccttccttttcatgaagccggccaaaagaaacatgttgcgcagaagtccacaccttgatgattatttcatcaaccagcaccttgaaccgagggatattagcaggtatggatacgaaagtagttatgatgtcattcccgcgatacccacccgagtagcctacatgtcggataccctacatttcttagatgtaaattacgtagctaatatgtttagaaatagtcccgcattagatatactatacgccactatggtgttgcctgtggaagcaaaatttaaacatccgagcatccacccagagatatacagcatcaactactcacacggtggattccagtacatcccgggcaaccacgcaggaggtgcctaccaccacgagttcaagcagttagactggttgtcagtgggtaggataaaatggaaagaactcacagactgggaggaacaacattgtataacagtgcagatgttagaggtgttaggcgccaacatcttgtacgtatttaaaaggggtaacctgctcacaccagcagtgaggactttccaagtagaccaatatgtagtccttcctagagtgttccacccccaggagatgaactcatccaggccgattaaacacactttggccatgcagctgctgctctacattaagacaataggcacccccacgtccaaggatgtctatggaaagataaggcagctcgtcaagacctcagagctcaattacttggatccaacggagctcatacacttgacgaattactactacttcatctccaaactcaacagcatcacctgttacgaagacatcctgtccaagaacatcctgagcggggtgcttctaccagcgaaacagtggctcatcagcacatgggagaaggtcaagggcaagcagcctttcaaccaacttttacaagcactgcagtgggagactttcacctactcactgaaggttgaggatgtagaaaccaccctccaggccccagatggcaattacgcgaaacgggagcgcatgcccctattcaatgacggtgggtttaaaacttttgaggtgctctccgaagatgagtccgatacatcctcgtcttcaggagaatctatagtggttgaggaggctcctgaagggacacccgttgactcaacccccaccagagcaggtgtcctaaaatgcgggtgtggaatggactttgaagtatatgatgaaagtataacccgcctcgatctacttaataggatagagacccccgaccaacttagaggcaggacggccgggttctactcaaagtccatggaaccatacgaatacactggggcaaaacacgaaagcctcgggtggccacagtggctggaggacttcgtcacgaccaactccataaactccgccatggaccactgtctcatccagatttacgatgagggggcggggatccctttccataaggatgatgagaagtgttaccctaaagacaacccaatcctcaccgtgaacctcacaggcactgccgagttcaaaataaggccggctaagcggtggaacagaacctgtacccaccttgaacataaactaggcccagacagcgccttggttatgccggctggagcacaaaagagccaccaacactcagtagtcagatgctcggccggccgcaccagtctcaccttccgcagcacctcaccaatagagaccgtttgggagaacaagctaccagatcaagtggaggtggacgtgcccatttacacctccgaagctggagacccacccactgacataacaaatgcagggccagcacaaaacaagcccgacgaggtagctcaacagccaccggtgcccccgcaaccggaacatcaaatctcgtctgatgacaaaacggacaggtcacggcgaggtgaccaccgagacagcaaccagggggccaaagggaaggaacctattaacgaaccaagcgacgccggcccatcacacaccaaacaggaacacgaacagtccgatgaccaggaccaggttgacgacctgaggtggaaacactggctccccatactcaaccgctgcgggtttaaggggaccgaattgcaacacgacccagaaggcaatttgataagccccatagagcaccaccacaagctagaaaaacgaccctttcccccagaatgcccaaaggcacttgcgaactctctgactgagatgaacaggcagccggtactggtctcattagaccatagacgggccacatgcgtttcagccgacgtgaaatatggaaaattcggaaagctgctggcagatcaggaccgtgcctggaaagagaagtttcactacaacacacagcaaaacaaacgaacaaaggaagtagtggttatacacggcgcggggggcagtgggaaaagcaaagtcatccaagacttccttaaaacggtttcggtggaagagtcttacaaatataccatcatccttcccaccaatgagcttagacaggattggctcacaaaagtccgaaacttagaagagaaaagcttcaagacctttgaaaaggctatgttgcagccttgtggggacatagtcatattcgatgactacggaaaaatgccacctggatacattgaggcgttcgccgcacaacaaatgaacggtgtgctctacatattgacgggagactctaggcaatccgtctaccatgagagcaattgcgacgccgccatcgctcagctttcctcaaacgtggaggaattcgaacagcactgccggtactacctcaacgccacgcacagaaaccgccgggatttagcgaacaagcttggggtgtattcagagagggatggcaccaccacaatcacacatggctctaccatcctcccaggggctcccgtgctcgcgccctccctgatgaagaagagtctgctaggcgacggggggcatcgatctatgacctacgcaggctgccagggcctcacggcaccaaaggtacagattttactggacaataacaccccactgtgctcggataaggtcatgtacacagcgctttcaagggccatagagcacgtgcacttcataaactcaggagcctcaagctccggcttctgggacaaaatgggcacgacaccataccttaaaaccttcctcaggctggaaagagaagagaaactgcgagaggaagaaccccccgaggcccctgagccggcagagcccgttgttagaacacacctgccagtcgacgacgcggctggaatctttgaggatctcatggccaagcagggtgaaaaatatgagcgggagatttacagccaagcccacggccattcaaactgtatccaaacgcaggaccagttcacacaaatcttccagcaccagcaggccaaggatgagactctgtactgggccactatcgagaaacgcatcgccatctcgtccgagtatgaaaacgagaaagaatttcggcttaaggcagacattggcgatgtgttatttgacaactacaagcgtgccatgtgtctgccggacgacccgatccccttcagcgaagaattgtggaacggatgcgctagggaagttcagaacacatacctctccaaagctgtccacctaatcaaaaatggggaggaccggcaaagcccagacatggacctggcccatattaaactcttcctcaagtcacagtgggtcacaaaaatggaaaaagccgctgcacaagtaaagccgggtcagacgatcgcggctttcgcccaatccacagtgatgctgtatggaaccatggcccgttacatgaggagaattagggagagtttccagcccccgaacattatgattaattgcgagaagcggttggaagatcttagcgagtttgttaagactaggtggcggttcgacaaggtggcatcatccaatgactacacagcctttgaccagtcacaagacggctctatgctacagtttgaggtcctcaaggccaaacactgcggagttcccccggagatcatagagggctacattcagataaagacccgggcacacatctttctgggggtcctgaacatcatgcggctaagcggtgaggggcccaccttcgacgcaaacaccgagtgttctatagcctatgtacacacgaagtaccacgtaccagccggctgcaatcagttatatgcaggagatgactcggccatggatgacgtgctggaagagaaacccagctttgccaacatcagggcccaaatgaaactggaggagaagttgcaggttcatgcccaagtaaaggggtactttgccgggttctgcggcaatctgataactccacatggcctggttaaagatccggtcaaacttttagcaggctggaagttgaagaagagcagaggggcgctgggcacggtcgtcgattcctacactcttgacgcacgacacgcataccaacttggggatagggtgcatgacatctttaccgaggatgagatgagctgccaccagaacctgatcagggagattcacaaggtgggtaaaggccaccttctcctatgaggacccagctaggcctgcccattaggggttttaagtttgtacatatgtaatggatgttattattagtaagatattagagtcagggtttactaggacagacgaaccgatctccgaaggcaaccaggttgtggtacacgctatagcaggctcaggcaagactaggttgattaaagagctattggacgcgcacaacttcataagagcttacactcacgggccagttcccagtagaggcatttcaggccgttccgtcattaaggcgaccagccagcctccccaaggcctgcctgaaggcacctacaccatcctagacgagtacctggcaggacccagtgagggctaccactgccttcttgctgacccctttcagtacgcacaggaaccgaaacgcgcacacttcataggaactcattcacaccgcttcgggcgcaacacagcggcgcttttaacttccttggggttcacctgctcatctgcacggtcagacgttgtactccacacagactactggaagttcaggcccaccgggcaggcaatagcgttccaggcggaggtctgcgcaaaccttagggccaacaacttggaacacaccaacgatacagaagcgctcggtaagacgtacaaagaggtcgccttttaccacactgactgggaggagctcaaagaggaggactacccagataggcacaagctctacatttgcctaacgagacacaggagcaagcttaccctggtgtcaccagatcacccaaactacccccaggtggtccaacaggtcacccctgcatcagatgcccctacaacctcctcctaattacataccagttctagtacccatagctgtaggtataggcttagccttacttgtcgtcacatttaggagcaaccagctacccaaccagggcgataatatacactccttgccccacggcggacgttacagggacggcacaaaacaggtattctacaacgcccctcagcaattccaacacacgcatgcaacccccgcttgggctctcttggccacagtatctctcgctctcattatcacttgcctttctcgctgccgccataaccctgtttgttgcacttccgggccaagagccagggtgtaccatatccattgacggtactggcatttacatcaagaactgcggtcaacacgcggaatttatacaatccgtaagtaagctaaaggtgccctcatacgggtttaagtttgattaacgccaataagatgtcgactagggaggagttagagagacaattagccgaagctgagaccgatgagcaaaaaactgagctacagtccaagatagacgacttgccagaggaccaaggacaaggtgacaacggtggtgacggggcctccggtggagatagagggccacccccgccgtcatccggcaggggcaccggtcaaggtagtgggccaccgctaagcatgactactggcccaacactgactcagctgggtcagttgaagtacaaaccacagactacggccgtggccaccagggatcagattaattacattgccggcctgtggcaaaagaacggagttccccaggataaactggctctggccgcttgggatctggcacgccactgtgccgacgtgggttcatcagacgctgcccgcatggtcgactactctccagctggccagaatataacacgtcagacgctggcaggcttagtcaagacagtgtgcacactacgccaattctgcatgttttacgctaaagtcgtctggaatatgatgctcaagacagaaaaaccgcctgcatcatggcagaagtgggagtacagatacaccgaaagatatgcagcttttgacttcttccagggcgtcagcaatgaagccgctctcaacccgaccgatggtctcttcagacagcccaccgatgcagaaatggcagcctcgcacaccaacagatatgtccacgtgcaccgcgcaggccaggggtcctcagattatcttacacttgccactgaggttcataagggtcgactccaggggacccgtgtcgaatatctggaagctccataatctagcccttcacagggcacctagggtcgcgaatgcgaagtccacaaccctaaacacgaggacttatttaatggcgcatttaaattttcttgcttgcttgtatttcactaaaccttcccttcctcccgaactcatccaggcgatctacaaattaggctctggacattgtacagaatggaataagtctacacaacagccttggggttgtggcacctcaaaaagtgccattaagcgcagaattaaaagatataacaaatgtcccaactgcgggcgcgaacgccaccccggacgttgtaagtggtcctcatcacacgcacaacaagacatccaggatctcttaaggataggggctattaggctacaggccgaacgacctatcagaccgaactccaacctggaacagattgttgagcacgagatggccatttctagacagttcagccctaaataatgccgcggtagtttgtgcttttagccgcgtgaacttcctttgcactgacgtaattagctaacaacg

SEQ ID NO: 546 - DNA, 1813 bp, Ambrosia asymptomatic virus 1
  source 1..1813: mol_type = other DNA
taataaagacccgggcacacatctttctgggggtcctgaacatcatgcggctaagcggtgaggggcccaccttcgacgcaaacaccgagtgttctatagcctatgtacacacgaagtaccacgtaccagccggctgcaatcagttatatgcaggagatgactcggccatggatgacgtgctggaagagaaacccagctttgccaacatcagggcccaaatgaaactggaggagaagttgcaggttcatgcccaagtaaaggggtactttgccgggttctgcggcaatctgataactccacatggcctggttaaagatccggtcaaacttttagcaggctggaagttgaagaagagcagaggggcgctgggcacggtcgtcgattcctacactcttgacgcacgacacgcataccaacttggggatagggtgcatgacatctttaccgaggatgagatgagctgccaccagaacctgatcagggagattcacaaggtgggtaaaggccaccttctcctatgaggacccagctaggcctgcccattaggggttttaagtttgtacatatgtaatggatgttattattagtaagatattagagtcagggtttactaggacagacgaaccgatctccgaaggcaaccaggttgtggtacacgctatagcaggctcaggcaagactaggttgattaaagagctattggacgcgcacaacttcataagagcttacactcacgggccagttcccagtagaggcatttcaggccgttccgtcattaaggcgaccagccagcctccccaaggcctgcctgaaggcacctacaccatcctagacgagtacctggcaggacccagtgagggctaccactgccttcttgctgacccctttcagtacgcacaggaaccgaaacgcgcacacttcataggaactcattcacaccgcttcgggcgcaacacagcggcgcttttaacttccttggggttcacctgctcatctgcacggtcagacgttgtactccacacagactactggaagttcaggcccaccgggcaggcaatagcgttccaggcggaggtctgcgcaaaccttagggccaacaacttggaacacaccaacgatacagaagcgctcggtaagacgtacaaagaggtcgccttttaccacactgactgggaggagctcaaagaggaggactacccagataggcacaagctctacatttgcctaacgagacacaggagcaagcttaccctggtgtcaccagatcacccaaactacccccaggtggtccaacaggtcacccctgcatcagatgcccctacaacctcctcctaattacataccagttctagtacccatagctgtaggtataggcttagccttacttgtcgtcacatttaggagcaaccagctacccaaccagggcgataatatacactccttgccccacggcggacgttacagggacggcacaaaacaggtattctacaacgcccctcagcaattccaacacacgcatgcaacccccgcttgggctctcttggccacagtatctctcgctctcattatcacttgcctttctcgctgccgccataaccctgtttgttgcacttccgggccaagagccagggtgtaccatatccattgacggtactggcatttacatcaagaaccgcggtcaacacgcggaatttatacaatccgtaagtaagctaaaggtgccctcatacgggtttaagtttgattaacgccaataagaaggccacaagggaggagttagagagacaattagccgaagcccagtatacgagct

SEQ ID NO: 547 - DNA, 5419 bp, Cassava Colombian symptomless virus
  source 1..5419: mol_type = other DNA
gtcattggaaccatctctgtacaacattaactataattttaatggttttcagtacttaccgggctcacatggtgggggttcataccaccatgaattcaaagacttggaatggctcaaagtaggttacattaccgagaaacacaaagaaggcgatgtttggcagcctcgtgaaaataatcagaaatacactactataacctgccagatgttggaaagctttggagccaatcatttattagtctttcaaaggggaaagctgctaaccccaagagttcgcacatttcgcagtgatgagatggtctacctgcctcagatattccatcctgctgaattgaatcaggttcagcccctgaagaagacgttagccatgcagctcttactgtactcaaagagcttgaaaacagtgacattaacagacataatcgcaaagattcgtcaacttatacaaacaaaggaacttgcgaattatgatcccgatgaaattttgcacatggccaactacttctacttcacctctcaagcaccggcattgaatacatacgatgatatcctatccttggatatatttgagaggttgaccttgccactcaaatctagaatagtggcattgtacgagaaactgactggtgcatccgcctttcgacaattacttcaggcattgcaatggagaacaatgacttactccattgaagttgaacatttctatgagggtatttaccctgagcaatggcctgttgatgaacgagagtactcggattctgatgaggaagatggtgaaagcagaccgaatagaaaggaagaaatcaatgacctctcaccaccgtctcccattcctgcctccaccagcaatgcagcatctagctccaacaatccaaatcctcagaccggctctgtcaaactgccatggcaagagcatcttcacatactcaacaaacacggttttagaggaactgaacttcagcgttattgcaatgggttaatcagccctatccttgaagttcgcgacttgcctgttcatgttttcaatgcacatgagagaatgccacccgcactgcttaatcgcctcaagactttaggtagagaacctgtgcgcgtgcccatcctctctagtcgagctgccccatatgcatccgatatcaaaaataatcgagttggggcttactacaggaaattaagtcaggcttggcgagacaaattgtcactagattgtgaaaatggtgacatcaccatccccatgtcagtgatccatggggctggtggatcagggaagagtcaattccttcaagaatggatgactaccctcaaaagagatcacaaggacgttgtcgtggttttacccacaactgaacttagagctgactgggttaggaaggttccaacaatagataatcgcgtcttcaagacttttgagaaagctctggaacgctcttacggaaccattgtaatttttgatgattacggcaaattgcctgctggttatattgaaacattcctctttgctcatagaggatttcaattagccatcttaactggggattcttgccaagctgttcaccatgaacctaaccatcaagcctcatcttacacaacgatcccagcagttgaacatttcggtgcctactccagattttatttgaatgcaacgcaccgaaatcgtaaagatcttgctaacgccctcaatgtctactcagagaaggaaggagtcaccaatattcgtcactcctcctccatcttcgagggtacccctgtgctctgtcctacaacaatcaaacagactgctttaagagagttaggccacaagtcattgacctactcttcatgccagggtttaactgctccaaatatccaaattttgcttgactcaagcaccccacagagctcaaatagggttatgtacactgctctgtctagagcaacagatgcaatcacttttgtatcgacagctaagtgttcaaatgacatgtgggacaaattatcagctactccgtacctcaagaccttcattgagcgtatcaaggaggaacctgcggcatcctccagtgtgcctgagattgaagaactggagccacagatcccaacacacttcccctcaactaataactcattcacacttgaagacttagttgaggagttacctgaaaagcatcaaagggaaatgtttagcccatcttttggctattcaaatgctattcaaacacaagataaggttgtccaacttttccagcatcaacaagctaaagatgacaccttactatgggcaaccattgatgccagattaacaattggcactgctgagtctaatctgaaagaaatgttcatgaagaaagatatcggtgatattcttttccttaactatcagcaagcaatgcagctcccaaaagagagaattccattcaatatcgatctttggagagcttgccaagaggaagtgtcttcgacctatctgtcaaaaccaattggtcagttggttaattctgcaatgcgacaatcacccgactttccgacaaataagatctctttgttcttaaaatctcagtgggtgaagaagacagataaactagggtgtctagtggtaaagcctggccaaaccatcgccagtttcatgcaacaaacagtgatgacctacggagtgatggcccgttatatgagaagaatgaggcaagcatttcagccagacaacattttgatcaattgtgaaatatccccaagagggctgaatgattttgtacttgaaaagtgggacttccaccgtgactcacacgagaatgatttcacagcttttgatcaatcacaaggtggtgctatgctgcaatttgaattaatcaaggcaaaacatcactgtatacctgaagatataatcgaggggtatcgtcaggtgaagcttaatgcccacatcttcctgggcaccctcagcattatgcgtctaacgggagaaggtcccacgtttgacgccaacaccgagtgctccattgcatatcatcatactcggttccatgtccccgcaggctcggcacagctttatgcaggtgatgacatggctcaggactccacaccaacggaaaaagcgtccttctccttgcttaaagagaaattgaagcttacctcaaagactattaggagaaaacaaaaagttggtgactttgctagcttctgtggctggcggataacaccattgggtgttgtcaaggacccccttaaactgctagcgggcctagagttagcggaaagacttggtaaggtgcaagatactgccctcgcttatgcatttgatgcgcaccacgcgtataaacatggcgatcggttgcatgaaatcttcacagaaaaggaagctgattatcatcaagctttagtaaggaaattgcatctgcatcaccaagctgacgccctcatcaggggccccacatagaagggttaagtttcctcattattcaatggagagaataattgaggaattgaacagagagaaatttatccaagtttctaatatcacagaatatccaatcgttgtgcacgcagtagctggtgcgggcaaaaccactttgctccataggcttctgaaagatcttgatctcaggatatgtacgactgcacaaccttctggattcagcattcttggaaggaaaatttctcgattctccatatctgagccgtgcgatattcttgacgagtatcccggtgctgagcatccaaaagcatccaaattactgctagctgaccccttccagtactctgccaacttatcaggagcgcatttcataaaattgcatactcatcgcttcggtaagaacacctgtgctctactgaaccgcattttcaaccatcactttacatcagacaaggaggattcagtggtgttcgcaggcctgtatcaaggggaaccaatcggtcaattgatcacccttgaagaggaaactttcaacctttgtttgaatcatcagcttactcctctaagaccctgcgaattatatggtagagagtacaatgaggtaactgtcctactatctgaaacttggacccattatcctccacacctcttgtacttggcactaactaggcatcaaacaaaactgctcattctcagtgatgccgttagttccaccacctgatccaaataagacttatcaggtcggcattgtagcagctgccatctgtgccttctgctacatttttgttagcgataatcgatcattcacaggtgatcgcgagaacgcctttccaaacggtggttctctctcttactgtaaaacagccaattttaatagaccttcagggataagatttcactcctcatctcacttccacgttttgttgctgatcttctcgcttattctcgccatcaaactctttggtcagagatctgtgcactgcccaacgtgcaggggttaagtctccatccatcttcgaagatggaagaaacaagacaacctgcgcgtcctgtcacttctaacacagcattcaatgctggagatatgtgtagtgcccccagcctctctgatcttgataatgttcaccacacttcaatgaatgcatcaatagcaacctctgatcaaattaaagctattggtgcgctttgggtgcaacttggtgtcccccaagcctctttagcattcactgcttgggatatggcgcgtcactgtgctgacattcaagcaacaaagacttccacaatgatagggatatctccatactgcggcctagctcgctcactcttagcgggcacgattaaaagtgtcacgacgatgcgcaggttttgctcatattatgctaaagtcgtttggaatatgctcctgaaagaaaataaaccgccagctaactgggccaagatgggtttccttgaggagacaaaattcgcagcgttcgacttctttgacgccgtgctcagcccagctgctttagaaccgaaaggtggcttaatccgggagccgacacaattggagatcacagcctatcaaactgcaaaatttgtggcactaaatagagctgaggtacacaggggcaatctcacctctaatctggctgaagttacacgtggtcaagttggtactaaaccaacaatccagctgcttaattgaccaacgctaactccctcggactgttggataaccgaggataaataatccatgtttagtcctcctagctagggactcttagtcatatagctagcatctgttggtaccgagataaccaacattaaataactcggttttcaggcatgcttcagcgtttgtggtgcctgtcatactaacgctatatattaactaggattagttatatattaatcgccataatggctaggtgaaggaaaacacctccaacgagaagttggtttaaaccgcacgtcgaagctatacgtaaaacttaaacagcgtgcttcataggtccaggaggagacctataaaaaaaaaaaaaaaaaaaaaaa

SEQ ID NO: 548 - DNA, 8657 bp, Aconitum latent virus
  source 1..8657: mol_type = other DNA
cgaaaaactgaacatacaatatcctgacatacacagaagtacactactataccctgaaattagtactacactactgtctacgtcactatggctctcacttacagaacgcctatggaggatattgttatctcatttgaaccccagacacaagcagtaattgctcagagtgctgcagtcatctaccagaaattggaggaaagtaattgccggtacttcaactactacttaacagctattgccaagcggaagttgagttgcgccggtatttatttaagcccatattctgcggctgtgcactctcatccagtgtgcaaaacactggagaattacatcttgtacgatgtgttaccgcattatgtaaatagtagctatttctttgtaggcattaaagataggaaacttaagttacttaagtctagagatcgcaggctcgaaggtgtgcaactcatcaatagagttgttacctgtgctgacaaattgcgctacagcaatgaactagttcagtacaactccctcccacatgagggcctggaagggcaccgaatcgcccttgaaggcgatacattaaagagactggtgggaccactcctccgacataaagcaaagcacctcttcctccacgatgagttacactattggagcagtgatgaattgtgcacatttttggaagtcatgcaacctgaaacaatgctagccactttagtgtacccacctgaactcttattcaagcaaaccaagagcctcaatgagtggtgttacaccttcgagataattagaaatactttttttttttaccctgatggcatccggagcgagggttaccaacagcccctgaatggtgggtacctgcttagtaccaacagcatcaaacttcaagacggcaccgtctatggagtcgatatcttgagcagcaaatttgcacaccacttagtcgctctcactcgaggtaaggcggttacgagtacacaccgatcttttgggccttttgaagcttctacagcttctggtttatcgagaatttgcccaagctaccccatctgtctgccaatcccgtgcgaggtcattagcaagatttacaggtacctgcgtaccttaaagaagccagacgtgcagtctgcaaatgctaaattaagtcaaatcgtcgccgaacccacaggacgtgaaatcacattcgttgaagaatttgccaaatttgtcatcaagacagattcaatctgcacaactttctctttcgacgaaatggagaagttcttccgagctgtgctcggtaagttgcctgcggtatttgcacggcaattcgctagcgtacgcgagctgggattgcacgaattcatcgaggggctagagcccttcaacttcacaacaaagctcaatgtgctcaaccagggtgatatctggcagaatctctacaagtggttggaagatgggagtgattgcgaggatctacccggcctgtgcgatggcacattcatgttcggcgtcaaatctgggcttcgagatagacgtgcgcaaccgtaccacggcacaatcgcgctctcagtgcaatcatgcggggccttgcttgtcatcccaaaggataaattgcgtaatcacctgattggcctttacatgagggaacgttgtgatgggttaacccgaaaggtttcacattctgctgtgctggcttactgtaccgaacgtctagcgcacagcatccttttaccaaaagtaagacgacgtggttgttctactacacgattgagtaccctcgagattctcggggtatgcgagttgacgcctctaatcagacgcataatccgctacgtcaattgcaaatccagaacgacctttggtgaatcaggcatcgagtggttcttacttcacaaaacatttagggcccggacactcttcttaaattctgtacctgatgctaagagagtggtgaaccccatcgccgctctgtggggcatggttgtttctgaagtggtctcttctggatgcagatggtctcacaaaactgaggaattctgtgaacctgcgcccactagagctagctttatcatgccacccctgaaggttaattcggtagcttgcgcaaaagaccagctcgcgagtacatctagtcaaatggtcgcatacagtaaagttgatgatgatgaactgcatatacctttcatatgcaaatgtggcatgtcaatgcccatcactgatctggtccttccagaacacccctttgattcacctgacactttacgcaatcggcgggcaggctggtattctagggggaacatcagttattcgtacaacggtggttctcatcaaagtctgggttggtcaaattacatcacgacttggtgtgaggtgaatggtgttgaaggtaagtacgactgctgcctttatcaagtctatgaagcagaagcagcgattggctttcatgctgatgatgaaacgatttttgagcccggcgagagcgtcctaacaatcaatttggaaggccgcgcatctttcggcatttcttgcgcaaaaggagatagcttccgagttcttaatggaccactgcagttcaccatgcctatgggatttcaggctgatcacaaacattgtgtgcgtggttgtaccgctggacgagctagcttgactttccgttgtctgaaacgcacacagctgcctcaagctattgaggtgagtgctaccaaacaatcacaaagtggtgatgattctgaagaatcggacgatcaaaaaggcgccgactacagttgccctggtgttaagtattctgaaaagggcctcccgaaggattccaattacacgacaggggaaagttgcccaggtcccaatagcttctggcgtagtctctctgcgctaacacgatacaacttgagcgaagtgaagagactgagcttaatgcacatttttggcgatgctagatgcgatcaagccattaagctctatcaatctacggggacgatcttgggcgattcgtgcatagctgctgccgctatacgtctcggtgctactataaccatatggaacatggaattggaattgcagcaaatctatgcccctgaaagcccacgcatggctctacaccttgaatatacggccggcatgtacaaacctatcttcttgaagaatggatgtgtcatcgttgcggtggctgaggcgatcgggcggaccaacgctgaagtgcaacaagtgctaaacgactgctgctgcgacgggctcctgaaggagatatggcgtggcgagggattgcaacgcaatgatatggagttggtattcaaagcttttgacattgaagcatatgttactgaaaatgatgataccagagtgtacaatgcttcgggtacgcttcggaaaaacttcaaattggtgaattcccacttgagttacgaaagccgggccaaggatccttgcagcacgcttttagctggcttggtggactcgaaatgtttccccgtggaagttctagattccctacgctctaaaggttttaccaggaagtatgtgattgatagcgttagagctgggatgcttgctgatacctttcataaagctcaaaccggcgtattgcagtctgaattatttaataagaagactaacctgcgcgagcactttagagaatcacatgaggtagacgtgacagttattgtagggatctttggctccggcaagagtcatatcttcaaaatgatgttggatcaagcgcggggcaaggtttttgacttcgtctcccctcggagggctttagctgatgcattcaccaaattagcaggggttaaaagggggaggcgcgatcgcataaagctcgggcaagagaattggcgtatcaacacatttgagaaattcctggatcgcacgcaattcttacacgaagggcaggtcgtaatcctcgatgaatttcaactgtatcccccggggtaccttgatctcattatgtctctgatcaaagtggatgtgcacctctttctggtgggtgatcctgcgcaaagtgattatgattgtgagaaagatcgcctggcactgcaatctctcccagatgtcgcaagtactgtgttactgaatgtcacctacccttataacggattgagtctccgttttcagaaccgcaattttttgggcaggttgccatgcaatttggatgagagcacggtgaccatggatgagccacacgagttacgagcaggcctcgacgtgcttgaacggttggaggaacactacagcgcactcgtgctcgtcagttcattcgatgaaaaaacaattgtcttgagctacctaccaaaggcgcaagtgctgaccttcggggagagtactggtttaacttttgattacggcacgatcctgatttctggcatatctgaacgagccaatgaacgtcgatggtacactgcattgagtcgattccggaagaacatctgtctagtgaactgtacaagttcgagctacgaaaatctagttgtctcctacaggaaaagggcacttggcaaatttctcagccagacagccaatctagacgatctaagagttgtgctccctggtaatcctgagttcagaaatggtttcacagaaaggacaggtaaggacgagggggtacgcgaggataaaatggtaggtgacccatggcttaagacgatgataaatctgtaccaaggagcggagatgcaggacgaggagatagctgaagcaataatacaggaatcatggttcaaaacccacataccccgtgaggagttggaatgcgttcgcgcgcgctgggtgcataaaatccttgctaaagaggatcgtgaggtgcgcatggggcatatgatctccgaacaatttacggatgattacagtaaacaggctggaggcattaggctcacaaacgctgctgaacgctttgagacgatctatcctagacatcgcgccaacgacagcgtcactttcatcatggcagttaagaagcgtttgagtttctctaaccccgccagggagcgagctaagctctttaacgctcaagcttttgggagaccacttctgaaggaattcctcaagcgtgtgccgttgcgtcccgcgcataatcacgaatttatggcgagagctttgtgggatttcgaagagaagaaactgggtaaaagcgccgccacaatcgagaatcatagtggacgttcgtgccgcgattggcctgctgatgtggcccaaattttctctaagagtcaactatgtactaaattcgacaacaggtttagagtagccaaggctgctcagagcatcgtgtgtttccaacacgcagttctttgcagattcgccccatatatgaggtacattgagatgaaggtgcacgaggccttaccaaagaattactacatacactctggtaaggggctgggcgaattaaacgactgggtcaagcgcggaaaattccaaggagtgtgcactgaatccgattatgaggctttcgatgcgtcgcaagatgagtacatcatggcttttgaattggagctgatgaggtatttgcgtattcctggagatctcattgaggattataaatacattaagaccagtcttggttctaaactgggaaattttgcaataatgaggttctctggtgaagcaagtacattcctgttcaatacgctcgcgaatatgctgttcactttcatgcgttatgaaatcaagggaaatgagttcatttgctttgccggcgatgacatgtgcgcgcccacacatctgcagacaacagggaggcacaaatcatttttagataagcttaaattgaaagcgaaggtgcagtttacgggcaaaccaacgttctgcggttggcatctgtgccctgatggaatctacaaaaaaccacagcttgtacttgaacgcatgtgcattgcaagagaattgaacaatctagctaactgtattgacaactacgctatcgaggttgcatttgcgtatcagttgggggaaaaggcgctcaatcgcatggatgaagaagaagtgggggctttttacaattgtgtgaggattattgtgaggaataggcacctcctcaaatcggacgttcgtttcatctttgaacgtgggctcggggattaaactacctgatccacgcacaaggtcgactaagtggtgcagatttataggtagtaattgtcttagtttaggtcgatactataggtttgatttatggatgtgttgacgaatttgttgaataagtacggattccaaagactgcatagcaaacttagcaagcccatcatcattcactgcgtgccgggtgctggcaagagctcactgattcgcgaattgctcgcgactgatgatcgtttcattgcgtacactggtggtattgcggacgaaccaaatttgtgtgggcgttggatcaagaagtgggagggcactgcccctttggatagactcgtgttgatagacgaatacacactcctgcaagaactgcccgactgctttgcggctttcggtgatcccttccagactaacacgaatctcgtgcaccccgcttcgttcatctgcaagcacagcaagcgcttcggaatcgctactgccgccctgcttcgtgatctgggcttcgatatcactgctgaaggggacgacgtcgttcaaatttcgaacatctacgaggctgaaccaaggggagtcgttgtgtactttgaagaagaagtaggttgccccttgcgcagtcattgtgttgaagcattgcacgtaagtgacattcagggcaaaacttttgaggaggtgacgtttgttactggtgagtgtggtcctataacttcacgggtgcaatcattccaatgcttgactaggcatcgcacatttcttcacatcttgtgtcccaatggtacttacacctccgcctaattacacgaacgcagttctgagtggcgttgcaggtttcgctctcgctctcgttgtctggcttcttaccaaaagtacactaccgcacgtgggagatcgcgagcatagcttaccccacggagggctttataaagacggtacgaaacaagtgaattactacaagccgtgtaaattaaattcaattgagggccacaaccgcggtctttccttccaaccttgggctttggtgctactacttgtacttcttgttgttctctctgagcgctttaactccaaacgctgcaaccggtgtagtgtgtcacacgcatgaatttggttctcatttgtggcttgttgagctttgccatagctttgtatttcctgtcaattaatgatcgtggtgactgctttgttataattacaggtgagtctattcgaatccaggggtgccatattaaccgtgagttcaacgaaggtctcaaagggctcagagcccttaataatgagtgcctttaggttgtaaggctgaggtctgatcaacacaatgtctgagactgaagctcaaattaaagcaagagaagaagctgaaattgcgcgtgttgtacaagctaagattgacaaagccgaggtggctaagaagaacgctgaaaaactcaaaacttttatcaatcctggactagatgatgatgacgcggaggggaaccttgaagcacgtttggatagtctgcgggactatttgcgaaagcgccgtggagccataagagtgacgaataatggtctcgagactggaagacctgcgctgcaactgagtggggacatgcgtcctgaccccaccaatccatacaacaggccatccattgaagccctatgcaagataaagccacgtgccgtgtctaacaacatggccaccacggaggacatgatgactatatttgtcaatctcgagggtttgggtgttcccacggaacatgtgcagagtgtggtcatacaggctgttatgtactgcaaggatgcaagtagctcagctttcctcgatccaagagggactttcgaatggcccagtggcgcgatcatggcagattctgtgatcgcaatcatgaaaaaggatgcagagacactcaggcgcgtttgtcgtctgtacgcccctgtgacttggaattacatgctcgcacataatgctccaccttctgattgggctgctatgggtttccagtatgacgaccgctttgctgctttcgactgctttgattatgttgagaataaagctgctgtccaaccccttgaaggattgatacgtcgtccgactccgcgtgaaaaagtggcgcacaacacacataaagatctagcacttcgtcaagcgaatcgcaatcaaacgtttggtaatttgagcgttgaagtgacaggtggtcgcaatggacctgaattaaccagagatcataatctttcgaataataaatgaagtggtggagggaagtagcgcttttactttatgcagattttataaataaatgcggacgtgctgagttcgctctgtgtgttgatatagctttagcttccgcacgccctgttggaggtgggacttcaagttacgctaggaagcgccgcgcaaaagctatgggccgttgtcataggtgctttcgagtgtggccgcccacctactttaccaagcggtgcgacggcataaactgtagacctgggatctcacataatcttagcgttgaacgccggatcaaactcggagtaactgcggtgataccgagtcgcccaaattaattgtgagttatcactaaatcctatttaatatataaggtgtgtaactataaaaagaatgaagttttatctatttttccttt

SEQ ID NO: 549 - DNA, 8601 bp, American hop latent virus
  source 1..8601: mol_type = other DNA
ggcgctcgggataaacaaccatacaccaacaattcccggacatcttaagaaataccataacgctctttcttaacacgtcaaatggctctcacatacagaggacccattgaggaaattgttggctgcttcgaaccagctgtccaatcagcaatcgcttctacggccgctaatgggtacaaaacgctagaggaagagaatttccatgcttttaatctagctttaagcgcaatcgctaaagagaaattatcaaaagctggaatttacctcagcccctactcgggcgtgccgcactcgcacccggtgtgtaagaccctcgagaattacatgctgttttcagttttacctagtattatagataatagatttacgttcgtaggaattaaaaattttaaattagactttctcaaagctagagttgagaaaaaaggcaagcgcaatgtgaacctcattgaaagtatcaatcgatacgtaacgagcgctgataagatcaggtatggaaacgatttcgttatcgcaagttcaaaaccctgcaaaatgcttaaaagacatgcaccattattgggtaaggcggcactgcgagaactgatccctgaatgtgtacagcggagggcgaagcatctctttatgcatgacgagatacactattgggatgctcgcgatctctgcgggttcttggaggtcgtcagaccagagacacttttggcaacactcgtttatcctcctgaactgctgagcggggctaaggaaagtctaaatcgttggtgctacaccttcgagattaaagattcgaacctccttttttatcccgatggagtccgctcagagggttatgtgcagccgttacgcaatggcttcctattgaaagccaacaggatcgttctggccgatggcactgtttacggggtgggcctcatatgtagcaaatttgcgcatcacctcgtggccataactaaaggtagcgagctcaacgtcgattatcggagtttcggccctttcgaagcagtggcttgcaatggtctttcaaaaatggcccgcaaggtcaatggctgtttcccggtatctttcgatctcgtatcgagggtgtatcggtatttgagaacactgaaaaaacccgatgtgcagtccgccatggcgaagttggggcagcttgttcccgagcccaatggagcagaaatcaaattcgtagaggagttctccaaactggttatcagaacaaacaccatcaattccacgatctgcgcggaccatgccaagttgttcttggggaatatgctgggttgcctccctggaatcttcttgcaaacttttggggttgctagagaggtcaatcttgactcatttgtagcagcgcttgaaccatacaccttcaccctcaagatgaccacgatcgatgacaattacaaggaggttattgactttcttaacttcggggagtgtgaggagggctatgatctggtcagcgcgatggatagcaagctctacggacctaggatcggtgtgcttaaccgcacccagcagccatatgtgggcctcgcgccagtgcgtgacgagaagaaagttctgcttcaattcacgaaggagcaggccttgagggccctggttttcatcctacacaagtcgttcaacgattcgtatcaaatcgggatttcaaaacccttgttaaaacgctggctgagggaggttcgcagcaaacagcgcaacttgtggtgtaagcatattgacgaactcctagtggatgaggccgaattaaccagagtatgcaagagggtgctcgccaagggaatcccaaagaaccggccgtacatgcctaaaagattggaggcggtacctacacgatgtgccgtcccacgtgaagccaagttggcctactcctgcgtcgtttccgacattttgagacgtggtgcaaagtggggagccgaggaactagccaagaaattgaaaattgaaaccccacttgtgactgagagcgcgcacaatatccccccacctgagccagttgaagcggaagtagtccacgagcctctagtttgcggttgcaatgaagacctctcctatcgcacattaccgcatgctgggttgatacatgagtatttcccagataaattgaggaatagagaggccgcttggtatgcaaagaacgggacgtgttaccgctatagtgacattacgcaccaatgtctcgggtggccaaactggattgagaagtgggctgaagttaacgacttggatatatcgggatatgactgtttgcttgcccaacgttatagggaaggaggtgcgataggtttccatgctgacgatgagtgcatctttgagaccggcggtagcatactaactgtgaatatcaagggaagagccctatttagtctagctggtaatgtatgcaggaaggtgtgggaactgaacgacggtgagtgcttcaccatgccctgcgggttccaacagacacacaaacacgcggtcagtgggtgctccgaaggtcgcatcagcttcactttcaggaaactcaagacgacctgcgttactgacaaacctgcccccgaaaccccacaggacaatgcatctgatgatggagccaatggatctcaatcaatagaaaagcctgtgctcgatgcagacacccaaatgagcgattccagtgattctggcggcgagcttgatagcgtcgcaagcaatagagaaccatctcttacttatgaggtaggctgcgtcgaattcacgtggcaacccgctgaattgtcctgcaataacttcaaatttgtgaaagttaacggtgatggtaactgcttctggtacactctggagcatttcactggtgtaaaccaaagaaggatcaaagaggctgcaaggactggcgcctcctacgacagcgagtttagcgtcaggttggctgagcagctgcaggaccgtgtgatggccgaggaagaggctattagtgcagcgagttacgcgctaagagcgcgtcttgtgatctatgacttcgagaagcaatgcatagtctcggtgggtaatgaggttttcaagcagacttatttcattggtctgagtaatgagcacttttcacccgttctaccggtgaatgattgcctagctgtggccatcgcagctcaccttgatcgcaaggttgaagacgttataaacgtactgagcaaacaaatggatgaagcgagcttcatggatctgtggtgtggcaagggagttgatgtgtcatttttgccacttatctttgagatgttcaatattgaggcactggtcactgggaagggcgaggatatccttatcaatgctggcgctgaatttaagggggtctacgatatcgtggaggagcacataacctatttacctgaacgcaaagtaccgcatcaccaggtcttgaataccaatgtgggcaccaaaggtgtaaacaaggggtctctgcagctcttgcgcggtagtggcaccatgttggactacgctccagaaatgagccgagcgctcagacttgccaaaaatcttttccaaggtcgtacaggtgcaataagttctgggcttttcaacgacaaagcaagtctcgagcctgatgttcacaacggggatttctcgtcaagggctgtttgtgttgtgttaggcactttcggcgcaggcaagagcaccttgttcaaaaaatttatgcaagcgaataaaggcaagtgcgtgcattatgtgagtccacgtaggggtttagctgatgattttgcttctgcaatgggcattgaacgaggaccgaggaagaaattgaacgtggcgtctcaaaactggagggtgaacacttttgagaaattcattgcagttatcaagagcataggctcaggcgcagctgtcatcatcgacgagatacagctttaccccccaggttaccttgatatttgcttagcactacttgaacgtgatgtacacatattcctcgtgggcgatccatgccaaagtgattatgacagcgaaaaagacagggcctcgtacgcttttgaattgagcgatattgagatggtgcttaaagagcgtgaatataggtacaacataatgagccgccgcttccagaatgcaaatttggtgggtcggttgccatgttacatcgatcaagagcggatcaaaattgatgagagctatctgatttatgatagggtggaggatttggcagatctgcccgatgagtaccgtgacgtgatacttgtctcttcattcgatgaaaagaagatagtggaaagttacacaccagatgcgaagcagatcttaacctttggcgaatcaacaggcaggaatttccgctgcggttgcatcctggtgacagaggcttcgaaatacacaagtgagaagaggtggatcacggcgctttcgcgtttctctcgcaatgtagcttttgtcaatgcaaccagcacttcatttgagcagctcttgttggtctacaaaggcaaggtactcgctgatttcctttgcaaaagaagtacagaggagttctttacgcagatcctacccggcaaacccgtttttcgaaaaggtttcagtaacgccgtcggcaaagatgagggcattatggaagagaaattgcaaggtgatccctggttgaaaacgatgatagacttgctgcagattgaggatattgaagaaaccctgattgatcaagaggagatgcagaaagaatggttcaaaactcacctgccacagtgtgaattagaatcggtacgcgcgaggtgggtgcacaaaatactcgccaaagagcatcgcgagaagaggataggctgcatgatatccgagcaatttacagaggagcacagcaaagaacagggcgttagattgacgaatgcttgtgagcgttttgaaactatttacccacggcacagggccaatgacaccgtgaccttcctaatggctgtgaagaagaggttgaggttttctgatccaaacaaagagcgcgctaaaatgcacgaagctggtaattacggcagattcctgttgaaagagttcttgaagaaagtgcccctacgtcagaaacacaacaaggagctcatggcgcaagccaaagcagattttgaagcaaagaaaacagctaaaagtgcagccaccatagaaaatcatgctggacgctcttgtagggactggcttgccgatatcggactcgtttttagcaaatcccaaatctgcaccaaatatgataatagattccgctcggccaaagctgcacaaaccattgtctgcttttcccatgcggtgttgtgcagattcgccccctacatgaggtacatcgagtacaagctcaaggaagttctacctgagaagtactacatccactcggggaaaggactggaggaactgaatgattgggtgattaaggggaggtttgatgatgtgtgcactgagtcggattatgaagcttttgatgcaagtcaggatcaatacatcgttgcttttgagattgaggttatgcgctatctaggcttgccagcagatttgatcgctgattatctctacatcaagacccatctcggttctaagcttggaaatttcgcgattatgaggttctccggtgaggccagcaccttcctgttcaacactatggcgaatatgcttttcacattcttgaggtatgaaatcaaaggccgcgagaggatatgttttgcaggtgatgatatgtgcgcaaacaccaaattagttatttcgagagagcacgaatggttcttggggaagctcaaattgaaagccaaagtggaaaacacaaaaaggcccaccttctgcgggtggaacttgtgcagtgatggcatctacaagaagccacaattagtgcttgagaggatgtgcatagctaaagagacaaacaatctccacaattgtattgataattacgcaattgaagtatcttatgcttatttgatgggagagagagctgtgtgcaggatgaacgaggaagaattggaagcatactacaattgcgtgcgaatcatcattaagaacaagcatttattaaaatctgacgtgcgtgaggttttccaggaggtttgctgaagggagggtttccgttgtgtgcttaggttttagctatatatcgatatattttatggaaatagttttagagattgctgaaaaatttggttttgttagagtgtcaaataagctttcaaaacctctcgtatttcactgcgttcctggagccgggaaaagttctctaatcagggagttgctcaacgctagtgatggtttcagggcttacacctttggggcctgcgatcgtgtgaatctctcaggtaagtacatccgccgcgccccctggtcggattccgacattcttgggaagttgctacttgttgatgagtacacagaggggactttcgatctctcgatagctttcgccgtcttcggggatcctttacaatcgacacgtgacaacttctgcaccccgcattttacctgccatctgtcccgacgctttggtcagaaaactgcttcacttcttcggctgcttggttaccagatagagagcacgaaagaggacgtggttctgattgaagatattttcaaggctgatccaattggcgagattgtgtgctacgagaaggagatctacaatctgctgtgtgcgcattgcgtagaattcaaaactcctgacgagatcagaggtgccacgttcaagaacgtaactttcataactgcctccagtgaacctgttgacagcaaagccgcattcatctgcttgactaggcatactgagaaattgcagatcttatgtcctgatgcctctttcgccccctcccaattacactaatgcggttcttgcgctagctataggaggaagccttgctgttctaactgggttgttcacacgcaccacgttgccacacgttggagataattcacattccttaccacacggcggcttctacagggacggaactaaggtgatcagttacggtgggccctgcaagctaaactctgtcgaaggtggggattttcgcaagcatagcgtttgggcgcttgttgtggtgcttattggagttgtggtatttttaagcagaccgcgcagagcatgtccttcttgcaatcacagtcattaagcgtgtgtatctgcttcatcatcggattcttactcgtgtatctcttcattgggcatcagagtgtcgagcagtgccaactgattgtaaacggtgagtcagtaaagctcctgagctgcgctttgagtccggagttggtggaagctgttggtaaattgaaacctttgaggttttgatattgctcttaggttataaagctgcttaattgaataacttacgcattgaaatgtcgaacgttgaaaggaaaaccgaggtcccgccaaccccaagccgagaaccgcgcatcaaggaccaccaggacgtcgtcccgcctgctccagcttcgagtggagccaagactccggggaatgacctgccaaatgccccaagacacgtggtgacgccatcacctgctcagattctggctgcagaagaagttaagaggctggatgagcttttagattcagtcagaagtgagcgcatgagtgtcattgtcaagaacatgagttatgagaagggcagacccagactgagaccgctagcggagatgactccagatctcaccaatccatacgctatgctttcacttgagcacttgattgccttaccgccagaagcgaattcaaccaatatggccacttcggagcacattgctctgatcttctctgacattgaaggcgctggggtccctacagagcacgtcacgcgggtgatcatacagatggtcctctactacgctaacacgagcagctcgaggtacatggatcccgacgggtctatatcttttgggactggtgctattccccgcgattccctacatgccatattcaataagaggagcacggccaggaaggtctctcgcttgtatgccccgatcgtctggaactacatgttgctgcacaacacgcctccgtctgactggcaagcgatgggtttcaggtacgaagagcgcttcgccgctttcgataccttcgattatatcctcaacccagctgcgattcaaccagtcgagggactcataagacacccaactagtgctgagtgcatagctcacaagacgcaccaacgcctggctttggataggaatgcacaggagaggctttcgggagttacgacaccgagattactgggggaatgcgaggtcctgcaattaagagggagtttcgacaagcgcactgatgaaaggagctcgtctagctactctgtgtctggtttttaataaattgtgtggtacttacgttatgccagtgtgtatcgatataatcaagcgctctcgagcgcctttgctcaccaatggcacttccaagtatgcccgcagacgtagagcgaaatctgtctgccgttgtgagcgctgttatcgtgtgttccctcctctccgtaatagtaagtgtgataataaaacttgtaaaccaggcattagttatcgtgaggacattaaagagtatatcctgtggggagtaactgaggtgataccccagcccgggaactgtttcagttgtcgcaaaaacttaaataatatataaagtgtgctactataaaaataattaagttttaaatattttcc

SEQ ID NO: 550 - DNA, 1120 bp, Caper latent virus
  source 1..1120: mol_type = other DNA
tcaggtgtccgagcaattaccgatgaacctgctaagagcggcggtgtggaactaacaaacgcggctgagagatttgaagctatctaccccagacaccgagcaagtgataccgtgacgttcttaatgggattgagaaagcgactacgattctctaacgctgctaaggagatggggaaattgcacaatgcaagattgtatgggaggtatttacttggtgaattcctcaagaagattccattgaagcgtgagctagatcatgagatgatgcaggaggctaagagggaatttgaggaaaagaagacgagtaaaagtgcagcagtcatagagaaccacgccggccgttcttgtagggattggctcgcagatgttgcacagatattctcaaaaagccaattgtgcaccaagtatgacaacaggtttcgtgatgcaaaagccgcccaaacaatagtttgcttccaacatgcagttctctgcaggtttgccccatatatgcggtatatagagaagaaattgcatcaagcattaccagaccggttctacattcactcaggcaagggccttgaggagttggatgcgtgggtcaagtcggggtgtttcgaaggtgtttgcactgagtcggactacgaggcgtttgatgcatcgcaggatcaatatattatggcttttgagcttgaggtaatgaagcacctagggcttccaaatgagctgattcaagattacatatacatcaagactcacctcgggtgcaagctgggcaacttcgcaatcatgcgtttttctggtgaggccagcactttcctcttcaacacgatgccaaacatgaaattcacattcttgcggtacgacattagggatatagaggctatctgcttcgcaggtgatgatatgtgtgcttcaaggagcctacgcatcaagaacgagcacgaccaattcttaaataaacttagactcaacgctaaagtgcaatttgccaataagcctacattctgcggatggcacctaagtcctgatggaatttttaagaagccacagctagtgcacgagagtatatgtatggctaaagagaagaataacctggtcaattgtattgataactacgcaattgaggtggcatacgcgt

SEQ ID NO: 551 - DNA, 734 bp, Fuchsia latent virus
  source 1..734: mol_type = other DNA
gcatcgtgcagcagacaccgtcactttcatcatggctgtgcggaagagattgcggttttcagaccctatgagggaaagcgccaaattgcaaaacgccatgccgtatggcccatacctgctcaaggaatttcttgcaagaatcccactcaggcccatgcacaataaggggttcatgcaagcagcattgtttgactttgaggaaaaaaaagtgagtaagagtgccgcaactatagaaaatcatagcaatagatcatgcagagattggttggccgatgtaggcatggtcttttcaaaatcgcaattgtgcaccaaattcgataaccgatttcgcgacgcgaaagctgcacaaaccatcgtgtgttttcaacactctgtcctatgcagatttgcgccctatatgcgatacattgagaagaagctcttcgaagtgctaccaagcaattactacatccattcagggaagggtctagaggaattgaatgattgggttatttctcaaaacttctgtggggtgtgcactgaatccgactatgaagcatttgatgcgagccaggaccaatatatagtcgcattcgaggtgtgcctgatgaagtacttggggatcccaaatgatctgatcgaggattacaagtatatcaagactcacctaggtagtaagttgggtaattttgcgatcatgcggttttctggtgaagccagcacattcttattcaataccatggccaacatgctgt

SEQ ID NO: 552 - DNA, 8659 bp, Gaillardia latent virus
  source 1..8659: mol_type = other DNA
ggataaacaaacaacatttctttagcatactttattgtatcacagcatccaataccgtacgcaatggctcttacatacagaagtccattagaagaaaatgttgccgcatacgactccaacgttcaatccctaattgccagcacttcagctcattactacaaggaggaagaagaaagcaacttcaaattttttaactaccacctcaccccggtagcaaagcaaaagttgatcacctccggtatctacttgagccctttctcagcaatgccgcactcacatccagtgtgcaagaccttggagaactatttcttgtatatagttgctgcacctttgttagatagtagattctactttgtaggcattaaaaatcataaaattaacttgctcaaaactaggaatagcgatttaagtatggtgagcaagataaatagatatgttaccagtgccgataaggtgcgctatggctctgattttgttacaaaaccgatttacacaggagaatgtttggcccgccacaggtcatgccttgaaggcgcaacactcaaggatttagtgccagcattaaaagaggggaaggctaaacatgttttcctgcatgacgaactgcattattggagccctcgagacctgatcactttcctagaacttgtaaagccagagatcatgtacgctacactggtttaccccgctgagatactagcgggtgcagcattcagcttgcacccttggtgctacacatttcaaatcataggcgggaaactgattttttacccagatggcgtccaaaccgaatcatacgaacagccgctctcgtgcgggtacttactcgaggcaaaacgaatcataacccgacactccatctacatggttgaccttgtacagagtaagtttgcccaccacctcatagctattacccggacagaggcgttgagcccgaactaccggtcgttcggaccgttcgacgccacaagcagctctgcgttgagcccgctgatgcggacagagaataatttcatacctgtcagttttgagattgtatccagggtgtaccgttacctacgaacgctaaaaaaacctgacgtacagtccgccatggccaaattaagccagctgttgcaggagccgcggggagtggaaatcaaatttattgaggacttttcaagcctggttataaataccgggactgtgaggtcaataattaaaccggagctggttaaactcttcctgggtagatggcttgggcgattaccacacgccttagcagtcaagttcagtggtgttagcgaggtaagtttagatgatttcgtcagtcaaatggaaccgtatacatttcaaattaagttggctgatgtggattggaattaccaccatcgctgggacctttactcaaaagcagaagaggactatggggtcgacgctagtaaattactggaagagagttttgtggccaatcggctttacgagtttggggatagagcaagggcaccttactacagtgtcaagggtcagaagaattggcaccacatcctcgaattaaggtctgattttgacgagatgtacttcataagtacttgcctcagagaattattcaatccgaccctgagtgggatatcattctatgaggtgcttggcgtccttactggcaaattgcaggctagcaagagcatactcattagcaccaagtcatccatcagacaaatgcaagagcctggccggtataacgtctacatgagagcagtgagccggtacgcgccaaagcacgaaagagagtgggcgagctcaggggcaaaatggttttttgtcagcgataggcacaatcagcagtacttgtgcgatcagcccgatggaattgccgtccccaaagccttcaagaaggtattcgggaccgtggtcggagatatcttggctggagtgaagttgcgtaagcgaagagttgttggtttcagactagctgaacagcccactcctgagaccacgagtggagaaggtgagggtggcatgaggcatgacccaaagccacagaatgacgcggagcccatcagagaagaagaggccgtgccagttgtcgtgcagccagagcagttgtgcccagcttactgtgcctgtggtattgagctagagcgttctgaattgatagcaaccgacctacacgcattccgagcaccagacaatttgggcaatagatctggcggctggtactccgccactggggtggggtacaaatacaacggtgggaagcacggatcgcttggttggcccaagtggctgggggtgtggatgcaactaaatggaattgatagtgactattacaactgctgcctatatcaagtttataaggaaggggcgaggattgggttccatagtgatgatgaggcaatttttgaagaaggggcctccatcttaacctgtaacattactgggagcgcggatttcagcttcaagtgcacagtgggcggcaactctcaatttctagatggacccatgagtatactgatgccggaggggtttcaggagagtcataagcactcagtaagcaggtgctccaaaggacgcgcatctgtcacattcaggcgcttggcaggggagatgattggggaacaaccaatagaagaacttcgaaaagtgtgcgtggcagaacaaagggagcaggggcccgaatcttcagagctgccagagcggagtgggagtgagcaacctggtgaattcacacagaggaactgcatcggtgtggtgaaccacaggcatggcataccaaacatgaattataacctcatcgatgtgcctggtgatggaaattgcttttggcattgtctaagtaaggccgtgagtatgggcgttaaggagctcaagcaggcttgtacccgtattgattttaaagatgaagagctcaacacgcgatttgaacaccagatgcagccaagggtattcgcagaggaagaagcaattatggcagcagcggccatactgagagctaaaatcattgtcatagctccggaaggcccccaagtctctgaattcaccccacatggtgagctcttgcaagtgcactatttggagatgaaagcgaatcacttccagctgattgaattaaagaactcgtgcgttatccgcgctattgcgagcgccatgaatcgagagtgccatgaggtactaaaggtgttagaagaatccggagatctggaggaaggatcacttttactttctgggcttggagttgaattggccgagctcgaacacttcttctcgctcttcgggattgccgctttggttgaggcaggcggtacagaacacaggctgaacgaaacgggtccagtgccagcatactttaagcttgagaacgcacacatcgaacatatcaggaagaattgcagcgtaaaaagtgaactgctcagaggtgagaacctaggtctgaatattacaaatcgatcacttctctacgccgagcaatgtgggtcatacctgaagtataaaccaaatgaatcaagggccaaggttcttgctgattgcttccttgcgggtagaactggcatcctcaattcaaagttgttcaataacagcgggaacctgttcgacgaaataaatcacaatggtgagcatgaggagtcggttttgggagtgtttgggacctttggatgtggtaagagtaccgcgttcaggcaattcttccatctcaatccggggaaaggggtcttttacgtctcaccaagaaaagcgctggctgaagagttcaggtccaagaccctaagcaggcaagtggggaggctggataaaatcaaggagaaaaattggctgctctgcacgtttgaagtgttccttaagaaacaccacctggtgaagccagggatggctgtaataattgatgagctgcaactatatcccccgggttacttggatctcaccatgctactatgccctaagggtgtgcttttcctggttgggggtgatccttgccagagcgattatgacaatgagatggacagaccctggcttggtagcatggagagtgactgcgagagattgctgaaggggcagaaatataagtacaatgggctgagtaggcgctttgtaaacaagaatttctcaagtagattacactgccaatttacagaggaccgcctaacagaggaggaaccccatctgctgtacacggggctcgatgaaatggtgcaaattgaggatgagtacaaagaggtattcttggtatcgtcatttgaagagaagaagatcgtaagtgcacatttcgatgttaaaagtgaggcaatattaaccttcggtgaatcaactggtttaaatttcaaacgtggggtgatcatcatcaccaacgtttcagcgctcacttcagaaaagaggtgggtcacggcactcagcagattcagcacaaatgtgtgcctggtgaacctagtcggggttgattggtcgacgttggcgaaggtgtacgtggagcgaactttggctaatttcttatgcgctcagtcacatcaaggtaagttgcttgaattgctaccgggtgaaccacatatcaccgcagggtttcctgataaaatagggaaggatgagggactgcgtgaagagaagatgcaaggggacccgtggctagaagggatgatcgatctgttccagattgaggacgtagaggaagttgaggaacagttcgaggaactgcaggangaatggttcaagacgcatcttccaagggaggagttagaatcggtccgcgctagatgggtgcataagctcctagcaaaagagttccgggaagtgcgcatgggttatctaacttctgagcaattcacagatgagtaccccaaggatgcaggcgtcaacctcacaaaccaagctgagagatttgagacaatatacccgagacatagagcaaatgacagcgtcacctttttgatggctgtcaagaaaaggctaaggttctcccggccagcaaaggaaaaatgcaagttgattgaagccagttcttatggtaggttcatgctcaatgaatttctcgacaaggtgccacttaaaaggaagcatgatccaataatgatggcacaggctaagaaagagtttgaggataaaaaaacgagcaagagcgcagccacgattgagaatcactcgggacgatcgtgtagggattggctgatagacattggccttgtgttctcgaaaagccaattatgtaccaaattcgacagccgattcagagttgcaaaagccgcccaaagcatagtttgcttccaacatgaggtactttgccggttcgcaccatacatgaggtacatcgagaagaaactgcatgaagtgctccccgaacgatattatatccactcaggtaagggcctcgatgaactcaatgattgggtcaagaagggccgattcagcggcatctgtaccgagtcagactatgaagcttttgacgcgtcacaggaccaatacatggtggctttcgaggtagaagtgatgaggtacttaggcctgcccaatgatttaatcgaggattacaaattcatcaagactcacctggggtcgaaattgggcaacttcgctatcatgcggttttctggagaagcgagcactttcctatttaatactatggctaacatgcttttcaccttcttgaagtatgaaataaagggtcatgagttcatatgcttcgccggtgatgatatgtgtgcctcagagcgtttggcgttgaaaaagcagcatgagtcatttctaggtaaactcaaattaaaagccaaggtctttatggttgacaaacccacgttttgcggatggaatctatgcccagatgggatctacaaaaaaccgcagctggtcatggagagaatgtgcattgccaaagaaaaggccaacctcgccaattgcatagataattatgccattgaggtatcttttgcttacaaactcggggagagagcactgaaccggatggatgaggaggaagcagctgccttttataactgcgtgaggataatcatcaaaaacaagcacctgcttaaatctgacatccgcacattgtacgaggaaaataagttgacttaggttactgtcagtgtgattgtatatggatgtgttagtagatttgttgaataagtatggttttaagcgtgtgaatagtggactaagtattccaataattgtgcattgtgtacctggagccgggaagagtagttgtatacgtgagctgatacagagtgattctagattcaaagcttacaccctgggaatcgaggacccgcggaatttacaagggatccgcattgagaagtacaaaggacagactgaagagggccacctgaacatacttgatgagtacaccctagagtctacagatctgagcaaattctacgtgtgctttggggatcccatacagacggattgcgcgactgtcaggcctgcagatttcatctgcaacgagagcaaaaggttcggcaggtcgactgcccagctcttgagggaactaggctttgacattacttcaaacagggaggattccgtgcagattgctgggatatacgaggtggaccctagagataccgtgatctattacgaagacgaagtggggtgcctgttgaagcgtcatctggtagaagcacatcacatcaaggaaatcataggaaaaactttcgactccgtgacttttgttaccactcataacggggttgatcacgaagggcgggcagcttcattccaatgcttgagtagacacagggagaatttgctaattctgtgcccaaatgccacttacggccccacctgatcataccaagacctggacagttgcagcaattggactaagcatcgttcttttcacattagtctattccaggagcactctgccacaagttggggacaacatacacagcctgccacacgggggttattacaaggacgggacgaagcagatcttttacggcgccccacataagctgaattcccttgaaaaggctctgagcgtgaaattccagccctgggctgtggtgatcggccttattgctgtgatcgtactaatcaatttgctcgaacgtagggggacgctgtgcctgcggacgtatacatgcttaaccggatccagtgtttaatattagtcactagcttggttgttagtttgtgcatagtgtatttcagggatcgtaataatacgtgtgtggttgtgattacaggcgagtcagtaaaaatagttggttgtgaatttacagataatttcgttgagtttgctaaggtagttaaaccggctggggtgcgcttttaggtgatcaagcttgaaattgataaagaatcagagacagtatgtcacctccgaaaccagcgccagaatcttcgtccacaagtgcggcagaaccgcagctcccgagagaaccggagcacgatgaacgtggaaatcggcagaagagccccgagagacggaggccacaacccagcagaactgggatcaacgaagaaacttccgagagtgatgtgggatctgacgactatcaggctgcggcggacacggagctactccatctaagtaggttggaagatctaatgcgaaggagacagaggggggttgtcgtaacgaatgcaggatttgaaacggggaggcccccgctgcgacccacagcagcgatgcgaacggatccagcgaatgtgtacggcaggcccactactgactttctatggaaaataaagccgcagtttgtgtcaaacaacatggccacagctgaggacatggcaggaattaaggcgaaactggagggcatgggtgttccgactgagtcagtgactgctgtactgatgcagctagctatcgaatgcgcccacaccagttcttcctcctaccagaatccggctggagtattcacctgggctggcggagctataatgaaggatgacgtgctgggagtggtacaggaattggccgggttgaggcggctctgcaggttgtacgctgcaataacgtggaattacatgcacatccacaaaactccaccgtcagattgggctgcaatgggcttcacattcaacacaaggtatgccgcatttgactgcttcgactatgtcgagaacggggcaaccatcaaaccacaaggaggtatcgtgcctcgcccaacaacagctgagtacgtggcttacaatacgtataagaggatcgcgttggataggtcgaacaataacgcatcttacgcgaatttgaacaccgaggtcacgggggggagaatgggtcctgagatcgagcgcaatttcaacaatgcgaacagcaagcgacaatgaattacgaccgcataaagagtgaggtaatgtttctacttttgagtaagtttctagagcgtgggagtgcagctcccttacctatcgtgtttagtatctatgtgcgtgcttttaataagagggttgggaacggaacttcggcctacgctaggcggcgtcgagctgtcagcataggaaggtgccaccgttgctatagggtttaccctcctctctggttttccaagaagtgcgataatcgcacctgtgtgcctggtatttcttttaatcacaaggttcagaattacatcctatggggagtaactgaggtgataccccaccctggatacaatttctgagcaaagctctgcataaaacctaattaatgtataagtgtgaagctaataataaataaataagttttaatatatttttcctt

SEQ ID NO: 553 - DNA, 8638 bp, Garlic common latent virus
  source 1..8638: mol_type = other DNA
acctcttccaatgggctgcggtatgttagtaccatagacaatattagataatctaaacagatcatcgaaatatcgtacctatggcactaacataccgcagcccattggaagaggtactcacctcattcagcgcatccgagcaaagtttaatcgcagagccagccattactagttatcgaggattggaaagagatctgttccatttctttaactacaatgtagggccatacgccaaagagaaactaatcggcgctggtgtgtaccttagtccattctccggtgttccacattcacaccccgtatgtaaaacccttgaaaaccacttattgtacagagtattacctagtattttagataattcttttctttttgttgggataaaagaaagtaaattgaacttcttgcgcgctcggcatcaaaatttgagtatggttgaattagtcaatcgttatgtaacaagcgcagacagaacaaggtaccccaacgatttccacctgagtataactgcagagcaatgtttcaatagatatgatggttttaagcacctgggtcccggattgcggaaactcttaccgcattgtattacagttaaacccaggagactgttcttacatgacgagctgcactactggtgtgagagggacctggttaccttcctgtcagctgtcaaaccagaaaaagttctaggcactgtagtttaccctcctgagctgctcaaaggggtaaaatttagcctcaataaatggtgttatgatttcgacgtcgagggcgacgatttgatcttttaccctgatggtgtgcgcactgagagctatacacagccattgagtggttgtttctatttgaaagtaggcacgctcaagcttctagatgggagcgtttaccacattgatgttgtgcatagtactttctgccaccacttgatttcaatcactgctggtgaggctgttcgggccccaaccaattctttctccaactttgatgcgaccacctgtcgtggtttgccgaatatcgcgttcagatccttgggaccatgcattgcggtgccatatcctgttattagtagagtgtaccggtatttgaggaccttgcaaaagcctgatttacagtctgctatggcgaaactctcgcagattatgcctgaacccactggatatcagattaaatttatgacagagttcagcaaaatggttattgacacccctgttggagctagtttcttccaggtagcaatttttgaaaagtttaagggtttcctaacaactttttttccgaagtatgttgctgcacgttttgatgttgctaggatccggtctttagatgaatttgtagagcatatgtgcccttacacgttcaaaattaaagctgtcgtccatgacatgaggttgcaccaattgctcttcccacgggatgaagaaatgcccagagacgaagattttgatacaatccgggcactagagatgcagtggggtggtggggcaaatggtgagaggataggtgctgcatacaccgttggccctttttgcgattaccccgttattgatgcgcagaaagttttccaactgctgcgagttatttcacgagagtggtcattttcattctcaatggtccaatattgcgaacggggtgattatacagaatttatgcaagcatctaaattgatctggttctcttcaaaacttgctggctgggacgtgtgtcttgcgacttataacaaatatgtgcatatgaggcacagtgattggaaacgcaggctgaagagctttaggtctattggttgtgcttggttttgtatgcgagttagatcttatgagcgttacatctgtgcgtaccccgaccaagcaaaaagttataaagctttggatgaagcatatagcacagttgtagctgacttgctcggaagccttgctcggaataagctaattatttccgctgctgctccaaagtttgataagactagcaaagttcccagggagggtgttgcagaggaaattcctgcgcactgtgcgcgaacgagcgctgcttttgcttccgcaccatgcggctccacagcatcatcggaatgttgcgtttttgagctaaatccacctgctcagattgctgatcttagctgttcatgcgatcgtactcttgctgtgcttaacgttttagcctacgaggctcttgagctagagtttcctgatcagttacctgggtgccgagccgggtggtatgtcaaggggccgcaggttgcagatgttggtgggtttctgggttgccagcaactcagatggcttgatttttttgacagtttcttagagctgcacggggcacaacccggatcttataacagttgttttgctcaagtttttgatcttgacagcacttttgagtaccatagcggagatgggggtgtctttgaggagggagccccagcgtacctttttcaaacgcgtggtacttccagggttcacgttcaaggtttgggttgttgtggggagcgggctctgcttgggccaatgtgcttcgagatgcccgctagtttattgcttgaacacaggtggaagatatcaaagagttccacaggttgtaccataatgacttttaggaaactccgccaaggggagcctccggtagttgagactactgcacctacagtgcagaaaggggtaggcgtggattcatcctttacttgggagcagtacggtgtcaccatcttgagcagtcatatgagtaaagcacctgatgggcgtattgaaccgcaacgcggcgatgggagttgttttttccattgtatggagcctttcaccaatttagaagcctcgctcttacgtcggacaatagcaaaagagatggcgagggattctaaggttttggagagtgatctcgtagagtgtcaaggtaatggacccgtttcagacggagttatagcatacacaattagatttttgggtcttaaagtgaggtttttctctccagaattgaatgaggtgcgcaaatttagcacatgcactgccacaaacttctgggtcgatgttttgcatcacgggaatcacttcgatcttttgtaccctactaatgactgtgtactgattgctttggaacaagggctcggccggaaacgcggggacattctcaaggttttaagcaggccgcagcactctgatatctttcagatagctactgggggcgtcgggttaactttggagttacttgagcctattttccaatgtttccagattgacgctcgcgttttatgcgggtcagaggttttcacttatcctacatctgggacttttgctttggattttgaactagctgacggtcatctttcgtttaagagtgcacgcaggaaagaaacagttagctcctgcttgaaggtagtggaagcgagtccacatggtaggttggttctcaattgtgcaggtacaggtgtgttgtttgaaatatgctccaacactgcgcacaagcttgcagagtcactttttgatggtcgtaccgggattgtgagctcaaaactttttaacaatagggaaaggtttgaggtcagctcaacttcattgctaccacgtactctaaatgttatttgtggggtctttggttgtgggaaaagtacactgttgtgcaaggctttagaaaagggccttggcgtatgcatttttgttacaccgagacgtagcttagccgagcaaatgactcagcttgttcagagtgtagagacttccacttccgtgaccattttgacatttgaaaaatttttgcatcaaatggttaatgttaaagaaggtagcactatcatttttgatgaatttcagttgtaccctcctggctattttgatcttgtgtgtagccagctcactgatggtatctccctgcatttgctaggtgacccatgtcagagtgactatgataacgccaaggaccgaggtgtttttgaggggctgctgcctgaccatcagaggatcttacaaggtatacaattcaggtatgcgactaggagttatagattctcgaacccaaatttcgttgggcgtttgccgtgcgcaatttcgaacacaaatgaggatgactttgaagactttgaaatacttgaagggattgagcaggtgcaggaaatagatgttgaatgttacttagtctcaagcttcattgaaaaacaggctgtacgagcgctcgtgggacttgataaagtagttcaaacctttggcgagagtactggcttaacatatgattgcgttgctgttgtcgtttctgaagcttcaaaattggctagtgaacggcgctggatcacagccttgacccgtgcacgcaagcgagtaaccttcatcacaaatttgggttgttcaaagcatcttatcgctgagattttcagtaatcgcgcacttgggcgtttcctctcttgtaccgcatccattgataatcttcgttgcttactacccggggaaccaaattttgtcgaggaactagtgccaacgattggtgcaaatttaggtgtggtggaggagaaggtcagtggtgacccctggttaaaaacgatgctattccttgggcaagtcgctgacgtggctgatgaaatagacgtggatgaagctctgcaaattgaaccctttaaaactcacgtcgctagaagcaaccttgagggtgttcgagcgttatggcatgacaagattaggctaaaggagcatcgcgagaaacgtatgggctaccttgttagtgagcagttcaccgacatgcatagcaagaatatggggaagaagctaaccaatgctgctgaacgatttgaaacgatatatccaaaacacaaagggagtgatacggtcactttcattatgggcgccaggaaaagattgcggttctccaagccagcagttgaggctcggaagttgatggatgctagcaattttagtgagttcatgcttcaagaattcctgaaacatgttccacttaaaaaaccacataaccaggcattcatggatgcttctcttgcggactttgaggaaaagaagacctcaaaaagtgcagctactatcgccaaccatgcaggccgctcatgcagggactggttaattgacacagggctagtatttatgaagagccagcactgcacgaaatttgataatcgctttagggatgcaaaagcggcacaggctatagtatgtttccagcacgccgtactctgcagactagctcctttcgttcgttacattgaacggaagatagctgaagtgcttccagagaaattttacatacatagcggtaagggtttggaagaattgaatgcatgggtcactcgtggaaggtttgaaggagtttgtactgaatcagattatgaagcttttgatgctagccaggatcagtatatacttgcttttgagctacatgtcatgaaataccttggattgcctagggacctcatagaagattacaagttcattaaaatgcacctagggtcaaaacttggcaatttcgctataatgagattctctggggaggcaagtacctttttgttcaatacaatggcaaatatgctttttaccttcttgagatatgagatcaaaggccatgagcgtatctgttttgcaggtgatgacatgtgcgccaatgcccgactccgccaccgacttgaccaggagaagtttctagggttgctcaagctaaaggcaaaggtatcatttacgcaaaaaccaactttttgcggatggaacttatgttcagatggtatttacaagaaaccacagcttgtgcttgagaggttgtgcatagcgaaagagaccaataaccttgcttgctgcatagataattatgcacttgaggtagcttttgcttacaagatgggtgagcgggctgttctgcgtatggatgaagaagagttacagagtcattacaattgcgtgaggatcattctgcaaaacaagaatctaataaagtccaatgttctcacctacttctccgcttagagagtttaattggagcgcttaggtttaaacgtaggttttgatatatggatgtactagttaataagttgcttagtttcgatttcgtgcgtgtatctagcaagcttagcaagcctattattgttaactgtgtgccaggcgctggcaagagccacctcattcgtgagcttctcagggaggacgagagatttgtagcctatacttttggggcggatatcactgaaaccactgattgcataacaatacagagagtaccagaggctaaacctatccacaatttcataattattgacgaataccagctgggtgattggaggagttttgagcccatcgctattttcggggatccactgcaaggctcgagcgagtgcttaaggcctcatttcacgactgacctgacgaaacgttttggctcctcaacttgctctcttcttcaatcgattggttatcaaatacgaagtgagcgtactgatatttgcattatagctgaagtcacaagtgctgagttggagggagtggtcattgcttacggccctgaagctgagtggttactgaagtggtacggtgtgtcccacctgagggtttgcgagatccaaggtaaaacttttgacgttgtgaccctcgtgacagattactcaattgtaacagaggacaacaggcgggatttatacctttgtttgactaggcacagaaataaactgcaagttctcaacggtgatgccactcttgccacctcctgataatactaaagcaatcttggctgtggctgttggttgtagtattggactcgccttgtttatgctgacgagaagtaccctgccccacgtcggagacaacttacattcgttaccacacggtgggagttatagggacggcaccaaatcaatcaattattgtggacccaggaagaattatccgtcaagcaaccttctaactaacagcaccgctttcgtgcctataatagttgttgcccttacaggtgctattttactgctttctcgtggtagtagccgctgtgtggcatgcgggagatcacacgcttaaccatatatacttgttctggtttgttgctaactttagttattttaagcttatttagtgtacataggcgtgctgaaagtagctgtactattattataacaggagagagtttaacgatccgtggttgtgaatttacaccagactttatcgaatatgctaagacgcttgaggtagccaaacattggtagccttaggtttcaagcttttggattgaaataattatgtcaacgagtgaaacagaggagcagagatcgcgaagacaggcctcagagagaagcgaagctgaacgccggaaaaatgacgcagctgtgagagctaggcaagatgctgctatcgattctgaggaacctgcggatgtgcaagacacgagcgttaatgatgttgatctgcgtcaaatggaaaatagggtccaggaagctaagcggtttttggagcgcttcaacaagcttaagaagttccaggcagacaatatgacagcaggtgagatcaagaatggagggtttgagactgggaggccaaaactgaatattgcggccaatttgcgcggcgacactgctaatgtattcactaggcctagcatggatgctttaatagcattggacttcaaagctgaatccttggcagttgcgactgctgaagacctagccgctatcactgctaaatttgagcagcttggggtgccaacttttggattagctccactttgttggtcgattgcaaggtattgcgcagatacaagttcttcatatgtagctaatccaaaaggaacttttgagtacccagggggtgctataacaagggacgctgtttatgctgtcatcaaggaagttacgaccctgagggctttctgcagagctttcgcaccagtggtttggaatgaaatgttaatcgctaaaagacctcctgctggttggcaaaccaaaggttacactactagtacaaagtatgctgcctttgatactttcgattacgtgcttaattctgcttgtgtccagccacttgaggggatcatacgggttccaaccgatgaggcggccatagctcacatgacaaacaagcggattgctatcgataggcataggcgcaatggccggttttcgagcacaaacagtttagttactgggggcatgttcggtaaagatatcaaaacaaacttcaatggatccaacaacgcagattagtgtaagtttacttttagtcgtaaagaataaattgtgtgatagtggcgtgcctactgacgtcgcgattggtattatagaaccaattatcaaagaggtgaggaaattgcagcgccaagaagagcaaaggctgctacgttttaatggttgttctaggagtgctattaaaagacgagctaagtatctcaataaatgtcataaatgcggtaaacaaagtcactacgggctttgttcgcgtaatcagactatcagtaacatggaagtggagtttctcatccgttgtgggacgattaggtatcttaccgaaaatccacaaagacggaaggactccatctacagttctgattatgaaaaattagtagagcgtgctacgcgtgtatagtagtgtgtcagagccatattggcgactattcagacctattttgaatagcttgactaaggtttaatatatttccttttaaaaaaaaaaaaaaaaaaaaaaaaaaa

SEQ ID NO: 554 - DNA, 8500 bp, Hippeastrum latent virus
  source 1..8500: mol_type = other DNA
ggataaacatacaatactttattataacctcaaatatatagccttacacggaaatacatttgagttataatcatggcactcacttacagaacgccaatggaagatattgtatctgctttcgatccggcaacccaggcagcaatagctaatacggctgcagtgaattacaagaatatggaggagaacctgttctcacatttcaacttcttcctctcacctgtggctaagcaaaagttgtctaatgccgggatttaccttagtcctttctccgcagtggtgcattcacaccctgcttgtaagactttagagaattacattttgtacaaagtacttcctacttacttggactccaggttcactatgataggtatcaagaacaataaattgaactccctcaaaagtagaaatccaaaattgcagatggttgagttggtgaatcgttacgttaccagcgcagacgttagtaggtatggtagcgaattcgtctgcagacgtagcgaggcacacgtggggctgaagaggcatgcgcgtgaattgtgcggtccaacattgcatgatttggtgcctcatatgatgaaagtcacgaataaatatgctttcatccatgatgagttgcactactggaagccgcaggaactgtgcaccttcctggaagtgttctccccagaggtcctattaggcactgtcgtttacccaccagaacttttaataggatccaccagtagcctgaataagtggtgctacgagtttgagattgttggctcagattttatgttctaccccgatggggtgaggagtgaggggtatttgcagcccattaatggtgggtacttgctgaaaagtaataaaatatcacttgcaagcggcgatatttactgcgttgatgttatttgcagtaaattcgcacaccatctaatttccattactaagggtgatagaattaccccatcctacagagcttttgcgccgtttgacgcagtgagttactccgcactccaatcaatctcaaggactgcgaggccgtgcatacctgtctcctttgatattgtgagtcgtatttacagatacttgcgcaccttaaagaaaccagataagcaatcggccatggctaagcttagtcagatttcgccggacccctctggtgttgaaatcaagttcgtccaggaattcgctgaattggtcatcgacacagagacaattaggagtactctgaatccgcagcgattgcgaaactttttcggtaagttgggtcagaagttacctggagttctagcatcgaaaatagacgctgtgaaggagatgtgcttggattccttcattgaaacgctcgagccattcacaatagggataaaattaaaagcactatctcatttggagaattttgaggcatggtccgcgcttgatgctgaggcagaggatgattttgaattgcccgaaaatatagagatgcagtttatccggggaagaacgcgagctgttccggaacgcgtggcacgggggtatgtagggttgcccatggattgcggtcgtggtagctgtagaagtacatgggtctctagagagctagtcctagagtacggaagtgctgcagtcacacggggcatgagtgtggttgaaagggagcaatgcactgcttctttagttcaggagaaatgccggtcaatgttcaaaacctcgctgtacttcgggctggcagcgatcgagctagttggtgacttggatgagttgagtgtggagatggccaagcggatccaaagaaaggctagggggccgaagcgctgtgatatttacaccatgggactacggtggttcttctcaggcgatgcagctgacacgaaataccttacgcagtggggcgaacatgtggctgtggtgccagaaatcggcaggaagtggaaaatgtgcgttaatgaggtatgcagctcgaagttcaaattacgcaaaactaaaaacactagaacttatacacaattgcttaaacatgtgaaggtcgataatcaggaaagtgagcatgcacgagatgggaaccccacggaagcagggtctagcttggcagattgtagggccaatgtgtgtacacagtgcgttggtatggatgcgctaagaagtttggcttacaccgaccatatgtttaaaatgccttgtgagacagaatatggtgtcgtcggatggtattcacgtggagaggtgatctgtgcattggatgggcatgagtacaaaagtctgggctggccggagtggttacaactgtggtgtgccgccaacgatgtggcccaaaggtatgattgctgtctagtgcagaagtttgcagctgagaaggacatcgtcggctcaatggttagcgcggagcaagtggaagacgcagagggagcactttgggttaatctgcaaggcacactcaaatttggcatgaactgcacatccggcaagttcgaattagggctcaaggaatttgagtgcttagaggtcggcaagcgctccttcgagggacacagcattgggagtgctatgtgcactggcaattctttgagtgcacgttttatgtgcttaaagaccgccaatagagtggacacaatagccatggagcagcatgaagccagcggggcacaaccggaagtggacaaaaatatggcaatccaaccagtgcctcggccactctacagcacggagttggaaaaagtaggggaatgcacacgcactgcaaataaatggctgtatggcagcaattttaaagttgttgagacccctggtgatggttcatgcttttggcattcactgtcttactttatgggtgtggcagcagaattgatcaagtcgcgggcagtcaagcactcctttgacagcgaggtgttgaacaaggagttaggcattagtgctagggagaatgcttatgccactgatgcgagcatatttgcagccgcgctagtgcataggttggagattcgggtgctggaggtgagttgtggcatcctgcattgcttcactgtggataatccaagacagatttgcctcatcaggctgaatggacaacacttcgaaccgatcctactcaaaaatggatgcgtaatcactgctgttgcgaaactccttggacgacgggatatggatattcttgcagtacttgaaagggaagcatcacgtgagctatgctttgaaatttggagaggtgcgggtgtcagtatggcatcgatacaatcagtctttgccattttcgatatccgcggagttgtgaaggggcaggagaataccactgtgttgaatgcacaaggagcatttgagggcctcttctcgctcaaggatgatcacctggagtatgtaggcaggaaaaaggatccttgctgtgaacccctactggtgactaacaacgcaaaggttttcagagcagctgaccttgataaactgatgcaaggtggtactatgattgagttcaagattgagcatgctagggcgaaaattttggctgatagctttcattctggtgggacaggcgtgctgcaatctgagattttcaatgctaaagcaaatttcgccgagcggtttaagcgccctgacggcacattggttgagatttgcgtcatatgcggagtattcggctcagggaaaagtcacggcttccttgaattaatgcagcgatcgagtgggaagatagtggatttcgttgcgccccgcagagccctgagcgatgagatgcaaaaaaaactggagatccctaagacaaagcggaaagctgggcaggaaaattggcgaatttgcacctttgagaagttcttagatcgctgtgcttacttgataccagggcaattggtgtgctttgacgaattccaactgtatccacctgggtattttgacttgtgtttaagtttgagtgtacctggggtgcactttgttctacttggcgatccttgtcagagtaactatgataatgagcgtgaccggggtaatttcattggtatgcgctctaatgttgacaaaatcttgggaggacgagagtataaatatgtggtgctatccaagagattcttgaatgctaatttcctggggaggatacctgccgaaattgcagcggaacaattgtgccttacagaggagcatgtgatccggcaaggcgtggagtacattactgatgtttgtgctgattttgataacgtagtgttggtgagctccttcgatgagaagaaattagtttacagctatgtaccactcgcaaaagtgtacacgttcggagagagcacgggcatgactttcaagcgtgggtgcattttggtcaccagtgtctctgagcgcacgagtgaattgagatggttaacagccctaacaagatttcgggagaacatcagttttgtgctctgcgccccactgcacctccaaaacgtaatgcttagctaccgcggtcgatgcttggcaaaattcctagctaaaacagccaaggtagaagatctgctccaaattctacctgggaagccggactatcagatgtcgtacagtcggctaattgggaaggatgaaggcgttcgggaggaaaaattggctggggatccatggctgaagggcatggtggatttgatgcaggcggaagaccaggaggacgtggaggtcttgcaggaaatctgcgctgaggagtggttcaagacccacttgccaagggatgagctcgaaagtgttagagcccgctgggtgcatcggatcatggctcgtgagtttagagagtgcaggatgggccatttggtgtctgagcaatttactgatgaatacagtaagcagaagggtgggatggaattaagcaatgctgcagagcgttttgaggctatttaccctagacaccgagcttcagatacagtgaccttcataatggcagttaagaaaaggttgagattctctaagcctgccgtggaatgcgcgaagataatgaaggcacagcagtatgggaaatttttgctcgacgagttcttaaagaaagtgccgctgaggcgcgcacgcgatacagtcatgctcgagcaagcacggcaggagttttttgacaagaaaacctcaaagagcgcagcaactattgagaatcactctggtcgttcgtgcagagactggctgattgatacagcgcagattttctctaagagccaacattgcacaaaatttgacaatagatttagggttgcaaaggcggcccaaagcatagtgtgcttccagcatgaggttctgtgtagatttgccccttacatgcggtacattgagaaaaagctccaccaggctttgccagataaattttacatccattctgggaaaggcttagaagaattggattgctgggtaaagaaatacagattcgacggggtctgcactgagtctgactacgaagcttttgatgcttcgcaggatcaatatatagttgcctttgaggtcgctgtgatgaactatttgggacttcctagagatcttgtgagagattacctgtacattaaaacacacttgggtagtaaattgggcaattttgcaatcatgcgtttttctggggaggccagtacctttctgttcaacaccatggcaaacatgctattcacattcctgcggtacgacattcggggggatgaggccatctgctttgcaggtgatgacatgtgtgcatcaaggagattacgcatcagagacgagcactcccaattcttaggaaagcttagactcaaagctaaagtgcaatttaccaataagcctacattttgcgggtggaacctctgccctgatggtatctacaagaagccacaactggttctcgagcgtatgtgtgtggctaaggagaataataacttggccaactgtatcgataattacgctattgaggtggcatacgcttacagaatgggtgaaagagccatcaacagaatggacgaggaggaggctgcttcattctacaattgtgttcggatcattgtccgcaataagcacttgctgcgatctaatattcgtaacgtgttcgagctaaatactctagtgtagcttaggtcatggctatatattgatatatggatatacttttggaaaagttaaatagtgtaggatttgtgcgtattgcttctagacttagagccccacttgttgtacattgtgtccccggcgctggcaaaagcacacttatacgtgaattgttgatagagcacacttgctttaaggcttacacagggggttctccaggtgttcctgaattgagtggaaggtttgtacggcctatttctgaatttacggagggcgaagagaacgtgcttattgacgagtacacactttgtccatctattcccgcaggaactttggctgtatttggagatccctgccagcctggtatagatcacaagttgaccgctcattttatctgcaaagactcaaagcggttcggctcccaaacaagtgaattcctttgcaaactgggatttgaaataagtgccaagggtcaggacgaggttgtggtccaggaattgtttgatagtgaacccaggggagtcattgtgtttcttcataaggaggttgagtgcctactgagggcgcatagtgcagaagggttctcgtgccaacaggtgcagggcaaaacatttgacgaagtctgctttatttctgccgagccatttgaagccgcaagagcaaaagagcactacatctgcctaacaaggcaccgcaaacgtcttcaaatcctctgccctaatgccacttacaccacctcctgattacacgaaggctgttctttgcgctgctacagggatttccatagcactgatcataggcttgtggacacgcaccacattaccttttgcaggcgatcaagcgcatagctttccgcacgggggtttctatcaagacggcacaaagagagcaagttacaattgtccgcataagctcaattcgatagggcaccccgctgtatcacgtgaagtaattttcctggtggttctagctttaagcggttgcatcgcttttcgtaccttggggcaatcaaggtgctgccagtgttgtgggcgtaggcatgcgtgagtacttcttcataggtattactgcttttataataactattgtgctattacttttgtgtcgtggtactccgtgtgttgttgtaataacaggcgagtcagttagggtccataattgtgttgttagtccgggtttgtttgatagtattgcaaaattacgccctttccgggagtaattctgcttttaggtgtttaagctccagtttgatcaacttcaagagtgttgaaagacatggcgactaaggtggctgataatccaagcgatccaaatgttggggagccaaaggctacaaaacctggggataacgtggacccagcagctgcagcagacttatttgacgatgcaaggctaatggaagatcagatcgaggagaggatggccagattgcgcgaatttctcatgaaacagcagcgagccgtgcaagtcacgaaccccagcttcgagctaggtaggccaaagctgaaaatgctggacagtgttagatcagacccaacaaatctctacaacaagccaaccattgaccaactatgcaggatcaggcccaagtccatttcaaataacatggcgacgtcgcaggatatggctgctataaccgtggccatcgaaagcctgggagtgccatctgagaaagttcaaacggtcattatccaggctgtagcctattgcaaggatgctagcagttctgcgtatcttgacccacaaggcacctttgaatgggaaggaggggcaatcatggccgacgcggtgctggcaattctaaagagggacgcaggaacactgaggcgtgtgtgtaggctttatgcccctgtgacttggaaccatatgcttgcacataatgccccgccctcagattgggcggcaatggggtttcagtacactgagcgtttcgccgcgtttgactgctttgactatgttgaaaatcaagcagcagtccagccatttgaagggctgatccgtagaccaacccctgctgaaaagatcgcgcacaacacgcacaagaggattgcacttgacagagccaatcgcaatgaacgtttcagcagtctcgaggctgagattacaggtgggcgattaggcccggagattgaaaggtcatactggaagacatgagggttgatattcttattgctttgtgtgttaatcgtgagttcaataaaaggggtgagcaccatattccattagcgatttacatcgctaagagggtgggaccaccactagtgagtaccggcacctcaacttatgctcgccgtaggcgagcagcgtcaataggacggtgccaccgttgttaccgtgtgtacccgcctttttggtggactactaggtgtgataataaaacatgtgtgccaggtatcagttataaggctgaagtggaatcatatgtaaagtggggagtagctgaggcgatacctcacttcaaactctaattgctactaaagcctatttaattgatgtcgtagtaatgtaaaccaatagtttttaaatattttttact

SEQ ID NO: 555 - DNA, 8612 bp, Hop latent virus
  source 1..8612: mol_type = other DNA
ggataaacaaacatacaatatctagacatactctgaacgatactcacaagcactaccgatcagactacgtcatcatggctctaacatataggacgcccatggaagatattgtaatttcatttgaaccacaagtgcaatcactgatagctaatagcgccgccgagctgtacaagaatctagaaaaagaaaactgcaagtacttcaattactatttgcctgctgtggcaaagaaaaaattgagtgcagcaggaatatacttgagtccgtactcagccgtggtgcattcgcaccctgtttgcaagaccttagaaaattatatgctatatagtgtactcccgaactacctagatgggaagtacttttttgttggaattaagaataaaaaaataaatctgttgaagtctaggaataaaaagttggaaagtgtgatatgtatcaatcgcttggtgactagcgctgataggttgcggtactccaatgattttgtgacctttgagtccgtatcgcatgaagacctcagacgccatgggcctggcttgagcgaacctgcgctgcaggggataattgaaccgctgaagcggcggaaggccacgcatctcttcctgcatgatgagttgcattactggggtagcgacgacctgtgtaatttcttgcaggtggtgcgcccagaaacgctgttggccacgatcgtgtacccacctgagttgttattcagacagaatagaagtttgaatgagtggtgttacacttatgaggtaaggggccaaaatttgttttttttccctgacggggtgcgctcggagggctatgagcagcccctcaatggtgggtatcttttgggctgcaacaaagtcgtgttgaaggatggaagtgtgtacatggtggacgtgctctgcagtaaattcgcgcaccacttggttgccataactagaggcgctgccgttacgagtatgcatcgatcatttggcccgtttgaggcttgcagctctgacagtctggcgaaattgtgtccagattaccctgtgtgctttccggtgccgcacgatgtggtgaacaagatctaccggtacctgcgcaccttaaaaaaacctgatgtgcaatccgcaattgctaagctgagtcaaatcgtgagtgagccaagcgggcgcgagatagattttattgaagacttttccaaattggtgattaaaaatgaatctttcaatatcaccattgtgcctgaaaggttacggcaattcgtaggcacatggttgggtcggctaccaagtgcgctagcctctaaactcgaacaggttcagagtttatgtctcagtgaattcatcaaaagtttgaagccccacaatttcacgattaagttggaagcactaaagtataaccacctctggaatgatgtgcgcctgtgggttagcgaggaagggctagaagattattcgatagagggcatagatgcaaagttcacaacaggttcgcatgtgccaccacgagttgcaagcccatatcagggcttggcacacttttgcgacagagcatggaagcctttactcctagtggataaaaaaatgcttagctcagtactaaagcgtctagcagtacagagattccgaggtgagcatcgcaggaggatctccacagctgagctggagtcttttgtggatagcttactagaaagagctaaattgattcaaaaacaaaaccgaaagggcagttttagggaacgtatagcagcacatcattatctcaactatgacacaattagggatgcagctagagccatagcttcattatgcatgcgttgggttagggccttattctcagaattgggaccaaggtggtttttgcgcttcaaccgatcgaacttgatgtggttaccagcacctagcgacgcaatattgctttcaagagaggcagaacaaaattgggcggaagtagtgcggtcaatttgcacccagttggggaagtcgagctattcttggggacagctaaccaggacgacgccggcagaggagctacctcgtgccactgatacgagcggcatgctgcctgtagctgctagcgtaggacttgctgagctttcacgtgcaggcactctcggttgcagctgcggtgtggccatggacattagctctatatcggttgctgagcacccatttgtggcacgggacttccttaaaggtcggaaggctggttggtacagcatgggggacgtaccttacacttacaatggcgggagtcacaaatctcagggttgggattctttactacagatgtggtgcgaggccaatgcagtagacccaaagtacgatagttgtctgtatcaaatctacacagaaggggcagcgcttggttaccatgcagatgatgaggacttgtttgagcagggtgaaagtattcttacacttaacttgagcggcgcggcagagttcggggtgaagtgtaagaacggcaaaggctcagtgcatctacggggcccgcaacaatttgagatgcctgctggattccaagtcacacacaaacatagtgtttggggttgtagcaggcaaagggagagtgtgacattcaggtgtttgcgcaagtcacgtgctattgctcaatcggtgcctgcaagcgcggcgcctgagctgctatatgagcacgcagttgaagcacagcaagttttggtggagaaggctgaaaggaatgccgatgtagtggcgtacaagctgggcagtgtggatgtgaatgtttgtgaggcgctgtgggaaactgtgtcctacgccgcgctggatgtccctggggatggttcctgcttctggcatagtgtgggtctactactaggtctcaattcattagagttgaagcggagatgtgtggggtaccggtttcacgctgagggactggatgctgaattggacaaggcggcacaagatggggcgtatgcagatgatacgtgtgtggcagccacagtggcagttataaacgtgcaaataaggatctggaataaggatgtggacaagctatttacgttcagtaaagcggacgttgacaaagtaattgacctgcagctggagggagaacattacatgcctatgctcattcgcaacaactgcgtggtgagagctattgcagatggattaaatagattggaatgcgaggtgcaacatgtgctggaaaggaaatgtgcaccagtgctgcttgaagatttgcgcaaaggtcgagggttggaacccatgaatttggagctggttttttcatgcttcggagtgtgcgcactggtagatgtgggtggccggactgtcgtgtacaatgaaggaggcggcactcacatgcaattcacactgtataatgagcacttaagttacaatcctaggaaaaagaagcctagcttggacctagtggcaggcgcaaagcatggcaagttgttcgcagcatccgtaatcgagtcactgcaagctatgggtacaatgattgcgcgtaagcctgacatcacaagcgcaggcctattggcggatagcttcttcgaagcaagtaccggggtcttgaggtctagcctgttcaatgatcagagcaatttgcgcaaagcctttattgagaatgccggggaagagagtaagcccatctgcactatactcggcactttcggttcaggtaagagctacattttcaagaaactcctcagtggcggtgcgggaagggcgtttgactacgtctcaccaaggcgggccctggcagatgaattcaagcggagtgtgggcttggtaaagaaaaagggcagccagaaagtgggccaagagaattggaaagtgagcacatttgagactttcctggacagagcgagtcatttgcttgaggggcaagttgtggtgttggatgaggtgcagctctacccgcctgggtacatagacttgattctctgcttgctgcatgtcccggtgcatctcttcctcataggggatcctgtgcagagcgattatgataacgagaaagatcgtgctgtgttgtcttgccttgcggagtgttgcacagcactcctccgggatgagacttataagtacaacatgcggagtaaacggttttgcaataggaactttataggccgcctaccctgcacaattttggaaagtgattgcaccactgaagagccacatgtcctgcgtgcgcatatagataatctagcagatttggaaccagcatacaccgaggtgattttggttagctcttttgatgagaaggttgtggcccagagctatcagtcgaaggctagggtgcttacatttggggagagtacaggcctgactttcgactatggcacaatactcataactagtgtggctgagcgagttaatgagaaacgctgggtgaccgcactcagtagattcagaatgaatttatgttttgtgaattgcactagcatgagttatgagcagttggccgtaagatacaaagggaggttcttatgcaaattcttatgtcgaggggctagaactgaggatctacagcagctgttgcctgggaagccacaatttactgaggagtacagcaaggcaattggtaaagatgagggggtgcgtgaagcaaaggttgcaggggatccatggctaaaaacgatggtgaatttgcttcaagcacctgatatgcaggaagaagaaatagcagagatggcattgccagaagagtggttccgtacgcatctgccgcgtgaagagcttgaaggtgtaaggagtcgatgggtgcataaaattcttgcaaaagaagctcgtgaagtgaggttgggggacattgtatccgagcagttcactgatgaccattctaagcaaatcgggggccgccagctcacaaatgcagctgagcgcttcgagactatataccctagacaccgcgccaatgacactgtgacttttatcatggcggtaaggaagcgcttgagtttctcaaaccctgcaagggaaagggcgaagttgcatgatgcatgtgtgtatgggcgtgcgctcttggatgtgttccgcaagcatgtgcctctcaggccagagcacaatcataaatttatggaagcagctttgtggaactttgaagaaaagaaattgagtaagagtgcggcaactatagagaatcatagtggtagatcgtgtagggattggcctattgatatggcccagatattctcgaaaagtcagctatgtactaaatttgataaccgattcaggctcgcaaaagcagcgcagagtatagtttgcttccaacatgcagttctttgtcgctttgcgccatttatgcggtacatcgagatgaaggtgcatgaggtacttccagctaggttctacatacattctggcaagggattggatgaactaaactcttgggtgaagggcggaaagtttgatggagtctgcactgaatcagattatgaagcctttgacgcatcgcaggatgagtttataatggcgtttgagcttgagctaatgaagtttttgcgcctcccacatgatatgattgaagattacaagttcatcaagactagcctcggttcaaagttgggcaattttgctataatgcgtttctcaggcgaggcgagcacattcctctttaataccttagcaaatatgctatttactttcatgaagtatgagataaaaggggatgagtacatttgctttgcaggtgatgatatgtgcgcttcaagggaattgaaagtcgttgggaaatacaagaaattccttgataagttaaagctgaaggccaaggtccaaatgacccaaaagccgacattctgcggttggcacctctgcccagatgggatttacaagaagccacagttggttttcgaacggatgtgcatcgcgctagagttaaataacttggccaattgtatagataattatgctatcgaagtggcttttgcatatcgtctaggagagcgtgctgtgaatcggatggatgaggaggaggttggtgcattctacaattgcgtgcgtctcatagtgaggaataaacacctgcttaagtctgacgtgcgcgcagtgttcgaggaaagtcctgtgagttgatcaagccccacaggggcgtttgcttgtagacttaggtgtttgtctgtagtttgatttatggatgtgttagtagatttgttgcataaatttggcttcgagcgtctcagttcaaggctgacaacgcccattgtagttcattgtgtgccaggtgcagggaaaagtaccttaattcgagaattacttgatttggatacgcgattttgtgcgtacacagctggggtgccagattcgcctaggttgaatggccgctggataagggctttagaagagtatccaggtacggaagggcgattggctattgtggatgagtatacactgttagataaactcccttttgagccgtttgccgtgtttggcgatccgattcagagcaattccaaaggtgtgctccctgcgcactttacctgtaacttcagtaggcgctttggtctagcaactagcaatttgcttagagatttggggtggaacgtgattgctgaggggtccgacgtggtgcaaatttcagacatttttggagtggaacccattggtaccgtggtgtatttcgaagctgaagtaggttgcctactccgcagccactgtgttgaagctaaatcgttggccgaaattcgtggtcagacttttgatatagtgaccttcgttacaagcgaaaattgcccctcttctgatgtgtgcgcggcattccaatgtctgaccaggcatagggaagctctgcatatactttgccccaatgccacttacaccgccgcctgattactcaaagttattgataagcgtggtagctggcgcagctgtggcgagctcaatttggctcctcactaagaatactttgcctattgtgggagatcgggagcatgcgttaccccatggtggactctacaaagatggaacgaaaactgtgttgtactcaagtccaggcaagttgaattcccttgagggacactcccgtggtttgcggtttcagccctgggcagtggtagtagctttggtgggggttatagtattattgagtcgggctagcttgggccgttgtcagttgtgcgggtgtaggcactgatgcttacttacctcctagtttgtttagttagttgtggtttgttcctctggttgctgaacgtgagtaacccaaatcagtgtttggtgattttgactggcgagtctgtgcgcgtacagggctgcgttatcaatgaagagtttggccgcgttatagccaattttaaagtgttgcaaatagtgtagctttaggtgtttagcagtagatcgaagttgaagcaatggccgacaaacaaggacagatgactgaacaacagaaggtggattctcagaagctgcagggggaagcaaagaataaagaaaaagctgagtcctcaaagaggaaagatgagttgcttaagaagtacattgatcctgggctagggtctgatgatgatgaagaggagatggtggaattgagattgagcaaattgagggagttcctggctcgtagaagggccgctattcgcgtgactaacgcagggctagaaacaggcaggcccgcactcaagcccacacccgacatgctgcctgaccctaccaacccgtacaataaaccctcgttggatgctttgttgatgattaagcctagggtcgtgtcaaacaacatggccacctcagaggatatgatgaagatctgcgttgatctggaggggttgggcgtgcccactgaacacgtgcaaagcgtgatcttgcaagcggtgttctattgcaaggactccagcagttcaccctatgtggaccctcggggctctttcgagtggcgtggtggggcgatctcggccgattcagtgcttgcgataataaagaaggatgccgagaccttgaggcgcgtttgcaggttgtatgcaccactcacgtggaactacatgttgctacataacaatcccccttctgactggtccgaaatgggctttcagcgcgaagatcgctttgctgcttttgattgcttggattacgttgaaaatgctgcggctgtgcaaccattggaagggctgatcagagtccccacagcaagagagaagattgcaaataagactcataaggatctagcgctgcgccgtgcgaataggaatcagcttttcgggaatctggatgtggaaataaccgggggaaagaatgggcccgagcttcaacgcgactactctaagtctaataattgagtatgttttacctgcgtgtcgctttgctgttgcataataagttcttagaacagtgtggtaggagtgattttcatttgtgtgttatgatttctctgcaagtccatcgccctgtgggggttggaaggtcgtcgtatgctagaaggcgtagagctaagctagtaggtcgctgccaccggtgttaccggttgtggccacctacggctttcactacgaggtgtgataataaaacatgctttcctggcctaacttacaatgctagcattgctaggttcatacgagatggagtaactgaggtgataccatctgcacccaactagtgtgggggtggccgctaaagcctatttaatatataaggcgtgtcactataataaaactttggtttttaaatattttcacc

SEQ ID NO: 556 - DNA, 8517 bp, Kalanchoe latent virus
  source 1..8517: mol_type = other DNA
gataaacactcccgaaaataactgcttataaattaccatataattcatagcagttacttatggcactcacatacagaagtccaatcgaggaagtgttaaccctcttagaaccagcggcacagtcgctaatttccaccaccgccacaacaagttaccagcagaatgagaaggagaatttccaatggttcaattacagtgtcacccctattgccaaggagcacttgagcaatgcaggcatctacttgagcccttattctggctacccacactcacaccccgcctgtaaaattcttgaaaattacatgctctacaaggttcttcccagcattatcaacaacaccttttacttcgttgggatcaaacaatttaaattgaatttcttgaagaagcgtcacaagaatttaagcttactcactgcgatcaataggtatgtcagcagtgccgacaagattcgatacggcaatgaatttgtcgttcgtgagagtagtgagtcgagattgttgaagaggcattgtggtgttcatgaatcagccaccctttctgctctcgtacctaacgttaagacgcacgcaaacttattcctgcatgatgagctacattattggagtaaggacgatcttatcactttcctggagatttgcaaacccaatatcatgctaggcacgctcgttttcccgccagaaatctttattggagctacgacatcactcaatcgatggtgttatgacttcgaggtacgcaaggacaagctcttcttcttcccagatggggtacgttctgaaggctacgagcaaccactaaatggcggctatcttcttcaaacaaatcagatcgaattgcctgacggcactgtgtattgtgttgatgttattgcaagcaaattcgcgcatcacctcgtcagcataacaagagggcagttggtcgtgcccacatatagatctttcggtccatttgaagctgtgcatgttggggccatgaaagacatctcacggggttttaaagaatgcataccaatttctatccacactgtcctacgagtctataggtacctccggtctttgaaaaaaccagataaacagtcagcgatggcgaaattctcgcaattaagccacgaaccaagtggcatggccatcaagttcatggaggagtttagcaatctagtcattaacaccgagagtatccgcacaatggtgcagccggaactgattaagacattcttcggcaaccttggacgcaaacttccaagctcactcgcagcgaagattagcgtaactaggtctgtgtgcttagatgagttcatagggttccttaaacctctttgcgtagatctcaagcttaaaagtatgagtagaagtacacttttggatttctttccattagtctgtgaggaagaggaaggcgtagatctcgttgacgcctatgatrataactggaatggcgcaggcatgtttgctcgagaaccacggccatacattgggatggcaccgatcattgacaatcttgagaaattcaggctttcgttgaatttggatgccatgcttcaaggcctcatggatttacatctcaaggcaaattactgtaggtgcacaggctttacgaccacactctgggattacatcgaatccctccgaagaaatgcaacgatcatcgcacaagcattcctgcatgttttaagtcgcgctgcaattgagaaggcggacaagtggttgcacgctgtttatgtacgtgaagtgggttttcatgagctcaagcataagtggttctcacagcgtaccagtagaagctgcatgaagtacctcgcatgtccaaccgaggaatcttatgtccggcagttcgaaagtactacacacatgaaaccacccatgaagggggtcgtgctcaggaaattcagcctcgatgattttgatgaggatttgtactacaacctttctaatgatctaagtacaccctcgttagtacagaggcaatcattaggccccagcgatccggtatctccaccacgttttttgggccctaccactcatgcacacttcaaggcatactccattgatgaactggatgaggatcaatattacaattttgagaagcatcaaatcactccagttcgggtcacaccgcaagaggttagatgcgaagccctcataccggcaaagcaagcagagcagaaccgaagcttaacttgcaagtgtgggattaacttgcctatatgcaaattgaagttcaatgaggaattgcccttcgagttcactgatcaattaaagggcagaagtggcgcctggtattctctaggaaatgttgactacagctacaatggaggagcgcataaatccaaggggtggccgcagtggctcgcgctgtggatgaaggtcaattctatcgatgagaagtatgattgcgttctcgtgcagcaatacgcagccaattgcgcgataggtttgcacagtgatgacgagaagatctttagaaggggtgaatcgatctgcacggttaacctcattggtagtgcccagttcgggatcagctgtggggttgttacgtggcatgaagttgttcaaggggatgtctttacaatgccaatgggctttcaagaaaatcacaagcattcagtgcagcacacaacagctggaagagtttcacttacattcagagtgcttgcaactgcacagagcttgccacgtattatgccacatgttgaatcatcatcaagtgaccatgaaggcccctccacggaggcgcctaatcaaatgggtacaaaatttgaaatggatggggtcacaatttcatgccgcaagctacgtgttcacccaaagtgtaaagtcatcaaaaactctggtgggggtgactgcttctggctggcccttgaatatttcacaggagttactatgaaggacatgaagcaggcgattaaacagaatatgtgtgacggaaattcagaacgccttgaagcgcaaatggggccacaagtgtacgccgaagacgaagcaatatgcgcagcgtgcaagcaatttggctttgacattgtggtttacgaccatatgcaaggcggggtgatcacatactcttccgttgataattctaaatgtgcgttgatgaagcttgcaggctcacactttgaagcgctggttcctattgaaacttgcacgattaaagcgcttgctgagtgcctcaaacgccgggagattgacattctcacacttgttgctaaagccatggggcatgaatttcttgagagccttctagctggcactggtttaaccattgatcaatttagttgcatggctacgctgcttgggattaactcagttgtcgagatgaatggggaggtcttccggttcaatgtagaaggtaacatctgtggactcttcagatttgagaatgggcatgcaacctttgtacaaaagagacctaccgctgcgcacgtgcatactaatgtggctgtgcacggtttggagatcaccgaccgcgagttgctgccaattacatccattagttctaaggtagaatacactccagatatctctcgtgctcagcttttgagtgatagcttgaatcaagggaccactggggtgctttgttcggaactattcaatgaacagggagtccttatgcccgctaatcctacccgtgttaaaaggagggtaaatgtcgtgctaggtgtttttggatgtggtaagagtcactccatcaggcaagtgctcgcgaattcaccaggtcgtgcaatcatctatgtgtccccgagaaagttcctgaacacacaatatgagagctatctgacatctttgaaggaagctaagggtggggagcatgtcaaaaacttcaagagtttcacgtttgaaaaggcaattttgaaaagcagtgccttcctgccaggggctctcgtagtctttgatgaggtgcagctttttccaccgggctttatggatctatgcttctgcagaatggctgaaaacatacacgttttactgctcggcgatccatgccagagcgactatgactctgagaaagatagaaatatattaagcgcgctcggcccagacatcagcaacattctcaaagaccaaacatacaattacaacatcgtcagtcagaggtttctcagggactgtttccgaggtagattgccctgcaaatttggagtagagctcaagaaaggggaacaactacaattgatcgagggtcttgatagcatcgacgctagcaagtcatacgctaaagtgtgcttagtctcctccttcgaggaaaagaagatcgctagtgcataccttggagcgaagtgcaagatttacacttttggagagagcacaggtgctaatttcgacgaaggctgtattctcatcacatctgtagctattttcacaagcgagaagcgctgggtcactgccttaagcaggttcaggatcaaggttgccttaattaacgcaagcagtacaagctgggatatcctctgyaagcagtacgagggccgcacacttgggcattttctctcgaagacggcaaagcctgaacatctacagagtattttaccaggcaaaccgctgttcactgagggctttctcattgaacgatttggctcagacgagggcaagcgtgaggaaaagctgcagggtgatccctggctcaagactatggttgacctcctgcaagtggaggatcaagaggatattgaggaagctaaggtcatcctacatgacgaatggtttaaagtccacctaccccaatgcgaaatggaaggtgtgcgcgctagatgggtgcacaaaattatggcaaaggaattccgagaaaaacgcatgggtttcctggtgtctgagcaattcacagatgaacattcgaaacaaaagggtaaagaactcacaaacgcggcagaacgctttgaaagtatatacccacgtcatcgggctgccgacactgtaacatttattatggctgtaaggaagaggttgcgtttttcagacccaatcaaagaagcagctaaattgaatcaagcaatgccctttggaccgttcctactgaaagaattcctcgctcgggtgccactaaagccgatgcacgacgcacgtatgatggctgaggccaaatttgactttgaggaaaagaaaacaagtaaaagcgctgcaactattgagaatcacagcaacagatctatgcgggagtgggctattgatatcggtttggtcttctccaagagccaactttgcacaaagtttgacaatcggtttagggatgccaaagctgctcaaactattgtttgtttccaacatgcagttctgtgcaggtttgcacctttcatgcgctatatcgagaagaagctgaacgaggtgctgcctgagaagtattatattcactctggtaagggtctggaagagctcaatgcatgggtcatcagaggcgagttcaaagacacgtgcactgagtcagactatgaagcctttgacgcaagtcaagatcaatatatcgtggcgtttgaggtgcatcttatgaagttcttggggttaccaaatgacctcattgaagactacaaattcatcaaaacgcatcttggttccaagctcggatcatttgccatcatgaggttctccggcgaagctagcactttcctattcaacactatggctaacatgctgttcacctttttgagatatgacattaagggcgctgagaggatttgctttgcgggtgatgacatgtgctcaaacacgagactgcatgtgagctcgaaacatgaaggtttcctcaagaagttgaagctcaaagcaaaggttgctcatacagtgaatcccactttttgtgggtggaacctttgctcggacggtatctttaaaaaaccacaacttgtctttgagagactttgcatagcgaaggagaccaacaatctggtaaattgcattgataattacgctatagaagtggcgtatgcttaccaaatgggagagaaggcggtygcgcgcatgaacgaagaagaggttgacgcattctataactgcgtcagagtcatcattaagaataagcatttgcttaaatctgatgtccgccttatttatgaatcgggaaaaattcagtagcttaggtgtttgcttatagattgtatatggatgtgcttgtgaattatttgagtaagtataagttcgtacgtttgtctagctgcataactcctccgattgttgttcacagtgttccaggcgccggtaagagtagcttaattagggatttgatcaatagcgattgcaggttttccgccttcactttcggtaaagaggacagccaatctattactggtgtgcgtattagtaaagctacaaaagagttagaggctagagagttctgtattttcgacgagtacttggaaggggacctacctccttgggcttttgccgcgtttgcagaccctttgcagggcgggagcggcaaagttttaagggcgcatttcatcaaggaagaatcgcatcgtttcggcaagtgcacagcgcaactcctccgcgaactcaaattttcagtcactgcaagtggtgaggatgtcgtgcaaatacgagggttgtatgaggttgatccccaggacacgataatctattacgaacgcgaggtaggggaattacttagagcgcactgcgttgaagcctacagtatctgtgaaattcgagggcagactttcgatagtgtgactttcgttacagctaattcaaaacccatcgatcgtgagctcagcttccagtgccttactaggcacagacgttctttgctgatccttagtcctgatgcctcttacaccgcctgttaattactcacaagtatacgttgcggcggttataggtgcggctgtcgccatyactcttggactcatttctagaagtacgctgccgaacgtcggggatttacagcataacttaccacacggcggtagatatcgtgacgggactaaggtcgttgaatatttcaaaccagggaagttaaactctttcgagtcacgcaactcattcaaatcacaaccctggttgctcgttgtattgctcattgcgcttatcattggacttagtagaaggacaaatgcctgcccaacatgtggtcgtcagcactaagcatcttgattttattgctaagttactggttgacctcatggatgatgggaagtatgtcgtcggctccctgcacgataatcattacgggggagtcagtgagaattacgggctgccatttgagcgcagaacatataaaagctttgagtcacctgaaggcgctacaagtgcgcctttaggtttgcaggcaggtaatcgttatactttacaccttgacattatggcaccaaaacctgacccagaggtcgcgggttctacatcacagcttggcgcaaatcaggcggcagtcgttggaactgtcggaccttcccgtgagaaaatgctcgaggataggctgaccaacctcatagaaacgctcaacaaagacatgcacaactccaacttgaagaatatcgcattcgagattgggaggccagtcctagaaccgactgcacagatgaagaggaaccctgcaaacccatacgggaggttctcgatcgacgagctttttaagatgaagatcgatgtcgtctccaataacatggctaccactgaacaaatggctaagatcacagcggacattactgggctaggtgtgccatcagaacaggtcgcagaggttatcctgaaaatggttatcatgtgcgctagtgtgagtagctcagcatttttagatccagacggtagtgttgagttcagctcaggggctgtgcctgtcgattcaatcgcggcaattatgaagaagcatgcgggccttagaaaagtatgccggctatatgcgccaatcgtctggaacagtatgctcgtccgtaatcaaccaccatcagactggcaggcgatgggatttccatttaacgcgcgcttcgcagcattcgacacatttgactacgtcacgaacgcggcggcaatacagccagtggagggcatcattcgaagacccacctctgaagaggtcattgctcacaacgcacacaaacgcttggctctcgatcgagcgaaccgaaatgaccgacttgggaatctggagaccgaatacactggtggcattcaaggtgcggggataactcgaaaccatcgaaatgcaaacaatgggtgagactaaatcctggaagaaagcagttatatttagcttgtataataaattacctttatgtttgtgtgtgcatattatgcggagggcctctagccgatgtgttggaaccggacgttctacttatgcgagacgtcgcagggccatttccataggcaggtgtgagaggtgttaccgctgctatccccctatctgcaattctaagtgtgataataaaacctgctttcccgggatttcttctaatgaaaaaattgtcaatttcatcaggtacggagcaactacggtgataccgtatcctgggttctgacaaagttctacctaaaacctaaaaaatatataagggtgaaactataaaaataatttgtttttaaatattttagc

SEQ ID NO: 557 - DNA, 3000 bp, Lily symptomless virus
  source 1..3000: mol_type = other DNA
aagctcggtaactttgccattatgcgtttctcaggtgaagcgagcacttttctattcaacactatggccaacatgctcttcacttttttgaggtatgagatcaagggcgatgaacggatttgcttcgctggagatgatatgtgttctaacaaaaaattattcatctcccagaagcacgctgattttctaggcaagctcaaattgaaagccaaagtcgctcacactaaaacgccaacattttgcggttggaatttgtgcccccacgggatatttaagaaaccgcaattggtgttggagagattgtgtatcgccaaggagacgaataacttggtcaactgcattgacaactatgccattgaagtcgcatttgcttacaagatgggagagaaggccagagagagaatgaatgaggaagaactcgacgcattttacaactgcgttcgcatcatagttaaaaataaacacctcttgaagtcggatgtccgagaggtgtatgaggagcgagctgaaaggtagcttaggtattagcaataaatattgtatatggatgtgttactaagtttgttgagtgattttggttttgagaggttgagtagcgagttaaccctacccatagtaatacatagtgtcccgggcgggggtaaatcaagtttaataagggctttaataaacaaagataagcgttttgcagcgttcacattcggcaaggaagattgcgagaatattacaggagtcagaatcaagaaggtgccggaggtgttgcaacaaattgaatttgcactctttgacgagtaccttgaaggggccgtgccgacctgggcttttgctgtgttcgctgacccactccaagggggacccggcactgtccggcgcgcacactttatcaagcgcaagtcccatcgcttcggcaagtgcactgcgcagctcttgactgagctgggttacgctgttgaagccgaggggaacgacgtgctccaaattcagggcctttacgacgctgagcctcaaggtactgtgctattttacgaaccagaagttggtgagctcttacgccagcactccgtgcctgcgtactgtattagcgagattcgtgggcaatccttcacaagcgttactttcgtcactggtgaatcctatcctgtcgatcgcgccttagctttccagtgcctgacgcgccattgctcatctctcttaatactttgcccaaatgccacttacaccaccgcctgattacacacgcgtgtacgtagcattcgccatcggagcatccattgcactattcacaggtttggtgacacgcagcaccttacccactgtgggcgacttgcagcacaacctgccgcacggaggtcgctaccgcgacggtactaaaagcgtcgagtactgcgggccgagaaagctcaactacgtggaaagcactgggcgttggcacaaccagccctggcttctagtgatagtactcgtggcactaatcatagccattgggcgccaaagccacacttgcagagtgtgcggtcgatcgcattgattgtttgcacagacattactggggtatatgttagttacaagcttcctgaattacccaaatccgaaacctgcaccctttacatcactggcgaatcgatacggattactggttgcaacttgagcccagctcacctacgcgcagtgtcacacctaaaagtgctacaagtgcgcctttaggtaaacaggctggaaggcgataaacaactacttgaattcaacatgcaatcacagtcaaagccagattcgggcgctgcagcagaaacttcagatcggactcgaggtggccgagcgggtccaagtcctgacgaacgaggtgcaagtgaaaataacgcggagtccatacttgagcagcgtttgactaggctaatcgaacgtctgaatgctgaaaaacacaactccaatctgcgcaatgtggctttcgagatcggtagacctagcttggagcccacaagcacaatgcgacgcaaccccgccaatccttacgggcgattttccatcgatgagctgtttaaaatgaaggtgggcgtcgtgtccaataacatggcgacaactgaacaaatggcaaagatagcatcagacatcgccggtttgggagttcctacggagcatgtcgcatctgttatacttcagatggtcatcatgtgcgcatgcgtcagcagctctgtatttcttgacccggatggtagcatcgagtttgataacggtgctgtgcccgttgactcgatagcagctataatgaagaaacatgccgggctgcgcaaagtgtgccgtttgtatgcacccattgtttggaacagcatgctcgtaaggaatcaaccaccagcggattggcaggccatgggcttccaatacaacacgaggttcgcggcgttcgatacgttcgactacgttaccaaccaggccgctatccagccagtggagggaatcattcgccgacccacatctgccgaggtcattgcgcataacgcacacaaacaactcgcgctcgacagatctaatcgcaatgagcgcttcgggaatctggaggccgattacactggtggaattcaaggtgcagagatcgtccgaaaccaccgatttgcaaacaatggatgaagcaaataagcgacgtgtgacaattgtcttgtgtttacttaaggtcttcccgcgtgatgtgtgcaatattatattaaggcaaacctctagccacgttgttggtttcggcaagtcgaagtatgctcgacgtcgtcgcgcccagcaaattggcaggtgtgagaggtgttaccgaatattcccacccgtttgcggttctaagtgtgacaataagacttgcaggccgggtatctctataaatacgaatgtggccaacttcattgatcatggcgtaactgaggtgaggccatggatcacgcccaaccggaacaagttctacctaagacttaaataatataagggtaaaactataaaaataatttgtttttaaatattttagca

SEQ ID NO: 558 - DNA, 8539 bp, Narcissus common latent virus
  source 1..8539: mol_type = other DNA
ggataaacaaacatacaatttccaaacatattctgagttatactacccgaccgtaccacaactcagactacgttgcaatggctctcacatacagaacgcccattgaggatattgtaaatttcttcgaaccccaaactcaggcggtgattgctaatagtgccgccgcgatatataagcagctcgaggaagtgatctgtcagtacttcaactactacatgcctgctatggccaagcgtagactaagtactgccggtatctacttgagcccttattctgccgtcgcgcactctcatcccgtctgcaagactttggagaattacatattatataccgtattgcccacatacataaataataagtactttttcgtaggcataatggagcgcaagctgcagctgctcaagaatcggaatagccatcttgatagcgtgcagtgcataaataggtatgtaactagcgcagataaaatgcgctatggaaatgatttcgtggtgttcaattcgcaccccaatgaatccctcggccgccatggcaaggggctcactgcaccaacgctcaaagacatagtcgaaccgctgcagcgccggaaagcaaagcagctgttcctacatgacgagcttcaccactggagcagtaagaacttagtcgacttcctaacccatttgcgacctgacactttactcgggacactggtgtacccccccgagttactatttaaacaaacccggagcttgaatgagtggtgttacacctttgagatcatcggtggcacattcttttattaccctgatggagtcaggagtgagggttatcagcagcctcttgccggtggtttcctactgaagacaagtaaaatagtactggaagatggtgactgctacatggtcgatgtgctgtgcagtaaattttcacaccatttggtctccctgacacgtggtgaggcaatcaactgcacgcatcgatctttcgggccattcgaggccacagcttctgaggaattaactgccctcagccctgaatatccaatttgctttccagtgtcttacgatattgttaataaaatctataggtacttaaggacactgaaagaacctgacgagcagtcggccatggctaagctgagccagatagttgccgagccgactggtgcagagatcgactttgtcgagggtttcgcaaggctcataatccgccagagtagcatctgtagcactattctacctgataatttgaagctatttctgggttactggttgtcgaaactcccgccaattttagcggctaagatacaaaatgtgcgcgagttctgcgtcaaccagttcattaaaagtctgaggccatacaactttacggcaaagttatgtgaagttaagtggtatgataactgggagaattccttcgactggttgatggacactagcactaatgccgacattgtgtcattgctggactccagcttcacctcaggcgcgcgcgaagctgtacctagatgggttggggccccttacactggattagctccagtacacgaacgcgcttggcgtagtttactaaaaatcccagcacgccatttattcgcctgcatccggcgcatgtactatcacgaggtcttctgcgagcacacacgtcacatatcgcttagcttcgttgaagaatttgtacattccaagctgcggtctagcttccttatcgctaaagagcgtcgtatacacaatagcaagactcacgtacccatctttgagttactggggtttgcaaccaagcggcatttgtttgtagccctgcgtagctcctgcgcaaggaaaatgcgctcttccttcactgaagctggccttgattggttcagcgatttgagacgctgcaaccaaaaattcgtctccaacgtgcctgatgcaactggggtacaccctgcactcactaagccatggaaggtcgtcatcagggatgtgcttgagatgccgcgattcaagaatagtaatattaagcaaggcgcttcaaccccagcatcttcttcttccataccaccgaaatcaataactgcaccacctgagcagaaacaacagtgtgcacagtcagcacttcaactagcttgcgcctgtggtctgagtttgcctgtaagaacgctgttgtttgctgaccatgctctcaaagcgccttacgacctgaaaggctgtactgctgggtggtattgcaaggaggacgtgcaatataattgccctagtgggtctcatgccagccttgggtggcccacttttctagatacttggtgtgaggtcaatgaaattcctgcaaagtataatagctgcttataccaagtttacaaggctggttcctctacggccttacactcagatgatttagggatgtttatccctgaggagggttttctgacagttaatttggggggatctgctacgctctcaactgagtgtagcggatcagttcgcagtgtagttctagatggcgccgtcttctttgaaatgccccatggattgcaaagcactcacaagtacagtgtttctgattgctcgccagggcgagccagcttaacgtttcgctgtgtcagcatgccaccaccagcccaattggctgggtccgggccacaaagcccaacgcatgaagctgctacacaatgcacgtctggtggtgctaaagcacaggaacttaccattgggggagttaagctcaccacagtcacgcagccaactaaggctaattatagggtgcatagtgtggccgcagatggctcctgcttttggcatagcctctcaatgctctctgggctggaaagtcagcaaatcaagaaactgtgcatgagtcatagcttctcggaccttgcgctcaacgctgaactcgccgagaatgctaaattagatgcatacacaaccgatgtaggtatctgtgctgcttcaatcaagctcaggactgaaattagggtgtggaacatgagcacaggtctgattcatctttttgtcccccgcaaatcaactgcaatcatgaacgttaggctctctgctgcacattttgaacccatttttttgcgcaacggatgtgtggttcaggccattgctgctgccctaggacggcgagaggctgaagtactaaaagttatcgagacaaagggcacaactgagctctgccaacaactttgggttggcgatggcttagaccttcttttggttgagttggcattcaaatgcttttccattgtggcgcacgtcaactttggtgaaactgagagcattttgaattcggatggcaccgctcactatcaatttagttgctccgaagggcacatcacatactgtgggcagaagaaagatccaggtgcaaccctgctagctaagacccctcacaacaagagtttctcaccagcagcactggagatgctcaaatctagcgggttagtcatagagtacatgccacaaattgagcgggcgcaagttttggctgatagtttgtttagagcctccactggtgtgctgcaatcggccctgttcaataacaaacagaatctgcgaggccgatttcgccaagtgcacgcaataccagtttgcgtaatagctggcacatttggttctggcaagagcacactcttcaaacgcctacttgaacatggcagtggcaagatttttgactttgtgtctccacggcgtgcactcgcagatgactttatggctcaggttgggctatccaagggccggaagaatatcaaagtggggcaggagaactggcgtgtacatacttttgagcggttcattgaccgcgtaccatatctcaatgagggccaggtgcttatttttgatgagatgcagttgtaccccccagggtattttgatttgatctttcacttagctaaggtggatgtgcattgcttcctggttggagacccatgccaaagcgattacgatagtgaacgtgatcgcttgacgctgtccgcacttgaaaataacgtgagccagctattggacggtcgggagtacccctacaagatcacaagtcaccgcttcttgaatagaaattttattgggagattgccgtgcaggatagttgaagcggattgtacgctcgatcagccgcatgagttgcggatgcatttggagaatatgccgaagcttgaacacaagtacttggaagtgttccttgtgagttcgtttgacgaaaaaacaatagtttacagctaccttccggatgctaccgttctgacgtttggcgagagcacagggttgaccttctcttacggcacaattctcataactagtatatccgagcgtgccaatgataaaaggtggttaactgcacttagtcgatttcgattgaatgtgtgcttcctgaactgctgtgggtacgactacaatgcacgggctgtgaggtataagggtcgtgcacttgcgcaatttctgtgtaaggcagcttcagaggagcacctcttgaccctgctaccaggaacaccacaattcaccgaggtgtacggctgcaaaatcggcaaagaagagggattgcgcgaggaaaaactacttggtgacccgtggttaaaaccgatgataaatttgtatcaggcaccagatgctttagccacagagttgccggaagaggtgctacaggaacaatggttcaagacccatctgcctcgggaagaactagagagcgtgcgtgcacagtgggtgcataagatactggctaaggagttccgcgaggtgcgcatgggcgacttggtttcaaatcaattcactgatgagcactcaaaacagttgggggctaggcagttaactaatgcagccgagcgatttgaaactatatacccacgccatcgcgctaatgatactgtgaccttcatcatggcagtgaagaagcgcttgagcttttcacatcctggcaaagaaagggcgaagctccacaatgccatgaactatggacgcgcgctgcttaaggaattcctgaagcgtgtaccactcaagccaaaccataataagcgctttatggacgaagccctgtggaatttcgaggaaaagaaggtgagtaagagcgcagctacaattgaaaatcatagcggtagatcttgcagagattggccgatcgaggtcgcgcaaatattctcgaagagccagctgtgcaccaaatttgataaccgattccgcgtagctaaagcagcgcaaagtatagtttgctttcagcatgcagtgctctgccgttttgcgccatacatgcggtatatcgagatgaaggtgcaagaggtgctcccacgcaacttctacattcattccggcaaaggtcttgacgagctaaatgcatgggtgcgccgtgggaagtttgatggcgtgtgcacagaatccgactatgaagcattcgatgcttcgcaggatgaatacatcatggctttcgagttagagcttatgaacttcctgggtttgccgcatgatctcatagaagattataagtatataaagaccagcttgggctctaagttgggcaactttgcgataatgaggttctctggggaagccagcacatttctctttaacactctggcaaatatgcttttcacatttttgaggtatgaagttaaaggccacgagtttatatgctttgccggggatgatatgtgtgcttccgctcatctacggaaaacggagaagtacagcaagttccttgataaattcaagctcaaagctaaggtacaatttacggccaagcccacgttctgcggctggcacttgagccctgatgggatctataagaaaccccagctggtgtttgagcgcatgtgcatcgccatggagctgaacaacttgagcaactgcatagacaactacgcaatcgaagttacttttgcatataagttgggtgagagggcacttaaccgtatggacgaggaggaagctggagcattctataactgtgtgcggctcatcatccgcaacaagcacctgctcaagtttgatgtgcggactgtgtttgaggtaagtgattgcacctaggacttgtttgtaagcttaggttttagctttaatattgatatattatatggatgtgttagttaacctattgaataaatacggtcttgtgcgtctgagttctaagttagttttgcccatagtagttcattgtgtgccaggtgcgggtaagagtacattgatccgtgagttgcttgcttgtgactcccgatttgttgcttacacaggtggattgggagatcctgctcacatcactggtaagtggatccaacgttggcaaggggattacgatcgcaccaaaaatctagtgctcgacgagtacaccttaatcgaagacgttcccggagctttcgcactatttggtgatcccattcaagtgaataccacaagcgtgaaaccggctgatttcatctgctacactagccgacgcttcggaagtgcaaccagtacactacttaaagcacttgggtggcccgtggaagcaagcggcaacgatctggtgcagatccatcacatttactcttttgagcccacgggtgttgtgatatactttgaggaggagatcggttgcttacttcgtgagcattgcgttgcagctttgggactcgaggagatccgcggcaagactttcgacactgtaacgtttgtgactagtgaaaatagccctttgatttcgcgtgaggctgcgtatcagtgcctcacccgacaccgtctggcgctgcatatcctttgccctaatgccacttacaccgccccgtgatttcacgaaagtttacatcgctgcatccgtcggagctacactcgcgcttgtcacttggttgcttaccaagaacacattgcctgccgttggtgaccgtgaccacaacttaccgcacggaggtttgtatcgggacggaacaaaagccatcaagtataacagtccctgcaaactcaattctattgagggacattcgcgaggcatttggaatcagccttgggctctggtctttatactgtcagtcctgatcataatttctaatcgcttggactcacgtgtctgccgccgttgcgggaccacccactaatgcttttgcttctagcggtcactgctgttgtgttcgtgattacttcatacatccttaccacagcacaaccgagctgtcttgtagtagtgactggtgagtctgtgcgattccagggctgcttaacaacccctgagttcttcgagggcttgtcaaaacttaagccgctttcttctcgctgcctttaggtgtataggctattattgatatacacaatgagtggagcttttggggttgacactgtttcagaatcatcactagcagcgcagaaagcacttgatcgtgcggaggctaaccaaaagaatgcagacaaactgaagaagtttgcccaacctgagagtgacgggtctgacgatgaagcttcactggagcagaggcttaacaaattgcgtgagttccttcgtaagcagcgtggcgcgatacgcgtgactaatataggatttgagactggccgcccaaccttgaacttggctgacgacatgaggcctgaccccagcaatccttacaatcgtccatcaattgaagctctcgcaactatcaaacctcgggcggtctcaaataacatggctaccactgaagacatgatgcgaatttataccgatctggagggtcttggggtccccactgagcaggtgcagactgttgtaattcaggccgtcctattttgtaaggatgcgagcagttccgtgttcctggacccacgaggctcctttgaatggattggcggagctatttcagcagatgctgtaattgcagtgctcaagaaggatgcgagtaccctgagacgagtttgccgtctttatgccccggtgacgtggaactatatgctaacacataatgcaccgccatctgactgggccgccatgggctttcagcatgaggatcgattcgctgcattcgattgctttgactatgtggagaattccgccgctgtgcagccgttggaggggttaattcggaggcctacgcctcgtgagaaaattgcgcacgatacccacaaggacatagcactccgggccgcaaaccgcaatcaggtctttgggaacttctctagtggagtcacaggtgggcggaacggccccgagctcacgcgcaactacggcaactctgggctacgctgaacaccatgcatcactctctacgtgtagctctactgcttaccaaggtaatgtatgatagtactggtgtgtataactttgaacttgcttataatattgccatcgcctctggccggccagtcggaggtggcaagtcgtcctacgctcgtcggcgtcgtgctgcgaacatcggtcgctgccaccgctgctaccgcctttggccacctatgcattctactactcggtgtgataatagaacctgtgtgcctggcatctcatataatgagcgtatcgctcagtacattgtggatggagtaactgaggtgataccatcctagattcactgttgtgagtggtcactaaatcctatttaatatataaggtgtgtcactataaataaagtttggtttttaagctattttttccc

SEQ ID NO: 559 - DNA, 8334 bp, Nerine latent virus
  source 1..8334: mol_type = other DNA
cggcatttaccttagtccttacagtggcatgccacattcacaccgcggataaacataacatctcaaagtattctcaagttaatcttagatcaaattgagaacacatggcactcacatacagaagtccaattgaagatgttatttctagctttacttcatccgaacagagtcttataaccactaaagctgtaagtgcatacaaaggtaaagaggatgagttgtttgatttcttcaattatgctttacccattaaggcaaaagagaagctgatcaacgccggcatttatcttagtccttacagtggtatgsyacattcacaccctgtgtgcaagactcttgaaaattatatgctatacgtggtggctgcaccactcttggaccagagtttctatctggtttctattaaaaaaaacaaactgagtttgttgaagagacgctgcaagtctcttgaaactgttgagtacctgaacaggttcgttacaagcaaagatagaatcaggtattcaaatgattttgtaggggttgatgcagaaatgccatcaacctcttacgatgcttgtgaaaggagaaggaatataatgttcccaagaaattttcaagggaaatcycggaaactcttctttcatgatgaaatacattactggtcaagaaaagatttgatttatatgcttgaacagtttcgaccagaatgtatactggctactctagtttgtccacccgaaatcttggcaggatctaaagaatccttaaataagtggtgctatgagtacaagatagatgggggaaagctacattactaccctgacggtgttcactctgaaggttacacccaacctttggacagctctttcctgctcaaaacgaaaaaaattcaattagatgatggtgagacttactgcgtggatctcatacattctaagttctcccatcatttgatttccattaccaaaggtgatgctatcactgatgatgttcgaacttttggtaattttgacgcagtatcagctgggcatcttaagcctcttgggagaaatatcggtcaagctttccccattagtattaatgtaattagtaagatctataggtaccttagaactctccaaaaacctgatgtgcaatctgccattgccaagttaggtcaactyttagttgatccaactggttttgagatcaaattcattgaagaatttgcacccttggtaattgagactggtaaaatgcgctcaatactcatgcctgatcttttgaagatttttaaagcagacatrtacagggttttaccagacttttttgcaagaatgctgaaggaaacaagtgaagtgagtttggataagtttatagccaatctggaaagtttcaatttccaagttaagctcataactttagattcgaagattcccatttttcttcaatttcaagaagaattttctgrggaaagtgctagtcatgaacccctcatygatgacacttttaatggcacgatttcctacaatcttaagaagatcaaaraggcagaagaacttgagagaagcaagtttttgggyagtaggcatagtattaggttagcttcwgatctagctgctaaacttttcgcttttattttttatcggagtttctctgattctgatggtcggattaaatcttgttggtcaaaaattggcggtacatataaggccttacaaaaaagcaaatttgggttcttgatgaaggaagcaacctttctggatgcacgcagcaagatcgaatggagactaaggagccttaatttccgttatggaaaaatctacttctccgaaaataatttaaggtggtttcttgaaaaagtaaggcgtttcaaccagaaaagtctctgtaacgctgagtgtgggttattgccttgttcaaaaaaagcttacactcaagtactagccgatatttgtaagttaagaaagaaggaggaccataaaaaaatagatttggatgatggggaaaagcaaactkcagaaggggaacaatggtacattgaagctgataatgagaaatttggcgaggccatgaaactttgcgaaatggcctacaattttgatgaacaccagggtgacccgtctttggaaaccttgtcaaccttttcagacatcatttctggagagactcattctwgttttatttgttttcagcctgtgaataatatagatctttttgacaaattctttttctttttagattttacccagaattttatgggkgcctgttttgagggttttaaaatgtacaaattcttgcccaattccgtwacattaagtgattgtgcgaatttaattttatgcgagaatcttgtggaggctgtcgctcctgcaaaaatttcagtagatgaaagcyctgctgaaggrgaagtgagggaagaaaaagaagctgaagtggagataatggaaacaaacaattgygaagctgatrggaatgaaccaacctttctccctagctgttttttaactttgagtagcaatagagaatatcttcaagaattcaaagttgttaaaactgtgggtgatggggactgcttctggcaaagcttgggttatttcctaaaccaggatgggctygctcttaaaaaatacgttttttcgaaggttgatacatgctcagaagacaaggaactcatgcgtcagaaaggcgacaaagtctatgctgagcaagaagctataggactcgctgcaaaagtccttcgaatcgacattaaaattatatgcccagaaatgccttttgatattaaagttatgggcgaagaaagcgaaaatcttgctactctgcttcttttgaaagggcattatgacatattgctacccaaggaagactgtgcaatcgtggcagtctctgaaacccttaatagaagatatcaagatgtatatagagtgctcaatagagaagaaaattcatacattttgagggaaatggaggaggagaaaggggtaaatttaaccactttcgaaaggatattatccttattctcaatcaagggtttctgcactgtcgatggcgagatagttgtactraatgatggtggcaactttgaagcttactactgcatttccgaaggccacatatcaaarataaagaagcaaaaattctacgacagccaaaaacagtaccctaaattgtgcaacaaattaacttccgcaatgtcraaagaattggaaaagatagcggacatcattcctttcaccccttccagtrcaagagcgaccaaactcgcacagagctttcacgaaggcagaacgggggttttatgttctgaaatcttcaatggcatgagaaagaaggaggttagtcaaattgtaccgaaayctcagaacctcaatgttattctaggaacatttggctccggaaaaagctcacttttcgtcaaggtgattcaaaatgagagcgaaaaagctataagttacgtgagtcccagaagaagcttggcggacgaatttgataaaagggtgaggaaaaatgggaaaagyaagtataaagctttcacagttttcactttcgaacagtttgtcaagaaaatgacaagattgmggaaagggcaaactgtaattatcgatgaaattcagytatacccacctggctatctagatctygtcttgatctgtacgcagcacttagaattgacttattatatcacgggtgacccttgccaaagtgattatgatagcgaattggacagaggtttctttctcggagacccatccgatatagatgaggtacttaaaggcaaggagtacagattcaatgcaatgagcaagagattcaggaataaaaattttcaaaaacgcttgccttgcaagatgagggaactcactattgatgatgattttataatacttgacggaatgaaggaattcgaagagctcgaacttaaatataaaaaggtgatcttggtgcccggcttcgaagataagagaattttctcgtataatgattcttgcgaagaagtgctaacttttggtgaatccactggcaggaatttcacttggggctgtgttgtaattacscacagttccatccaagtttctgagaagaggtggataactgctttaacaagattttctgatggtatctctctgctcaatttaacgggtgaaaatagcgcaaatcttgagaaaatttttgatggtagggtgcttagaaaattccttttacaaagcgccaatattgaggattttaagaaaatgcttccaggttcgccaatttttgttgaaaattatggagaaaagctcggtaaaaatttcatgattaaggaagaaaaagttagaggggacccatggctcaagggaatgcttgatctcatgcaagatgaggaccaactagagcctgaggctatggaaataataatgcagaaagaaagctgcaaaactcatgtaccaaggagcaatatcgagcacatccgtagttttttcctgcaaaagttaaaggcaaaggagtacagggagtgcatgtttagaaacaatatcaccaatcaattcactgataaatacgagaagggyaatttcaaaaggctaacgaatgcaagtgaaaggtttgaagcaatttacccaagacataaaggtgatgatactgcaacctttttaatggccgtaaagaaaagattaagattctcaaaaccggctcaagaagttgcgaaattcagagcagcagaaccttttggggagtacatgcttggggtattcctyaaacatatcaaattgaataagaatcatgaaccccaaaaaatggctgacgcaaaacgagaattcgaagagaagaaaacgagtaagagtgcagcagttattgagaatcacagtggccgaagctgtagagactggttaatcgatcttggctttcttttcattaaaaatcagctctgcacaaaattcgagaaacgcttcgctgatgctaaagctgctcaaacgatcctgtgtttccaacatgaggtactatgtaggtttgcaccctatgtaaggtacattgagaaaaaattaaatgatgctttgcctgcgaagtattatatacatagtggtaaaaatattgatgatctcaatgactgggtgaaggacaatgatttctcagggatttgcactgaatccgattatgaagctttcgatgcatcacaggatcattatataatggcttttgaagttgcgataatgaaatacctcggyttaccaagggacttaataaatgactacatttttatcaaaactcaccttggytcgaaactagggagttttgcgatcatgcgtttctccggtgaggcaagtacttttctttttaatacgatgagcaacatgctctttacttttatgaagtacgagatcaatggatctgagtccatatgctttgctggagacgatatgtgtgcttccaaaaaattgaggttaagtgatgaacactcaagttaccttgaaaaactgaggttgaaagctaaagtctgtttcactacccgaccaactttttgcggctggagcttgaatagacttggtatctttaaaaaaccgcaacttgtctatgagagaatgtgtattgctatagaaaagaacaatttgcaaaactgcatagacaattatgccattgaagtttcatatgcttacctgatgggtgagaacgctttggtactcatggatgaagaagagatccacaatcattatatgtgtgtacgaactattgtccagaataagaatctccttcgctctgacatttacaaagtctttcagcaggcatagttataactgtagcttagataataactttttaaattgtatatggatattgcgttaagtttgattcgtgagaaaactgtttgtattaataataatttgaaagacactattgttgttaattgtgtgcctggtttcggtaagtccactttaataagagaaatcctatcaaaaagcagaactttcagagcttacacttttggtgttccagacccgaactctttggataatctcaggatcagaagcattaatgattttgtggctgaagaaggttgccatgttataattgacgaatacactgaagggaactttacggctttcaaaccgaaaataatctttggagatcctaatcagactggcagaaaggttgaagtgcaktgtaatttcattggaactgaaaccaaacggttcggtaaaagcacctgcarattcttgaacgccagaggctatcagataaattcttcaagggaggatgagcttttggtagaatacatctacagcggtgagccgataggtgttattattgctgttgaagaggargttaaaaaacttttgagagcacaccatttaagtttcaargacgaaaagagttcaagaggagaaacctatgatgaggtaacttttgtgacttctgatgccaaaaggaatgattgtgaatatcgatggaagtcatacatagcaacaactagacataggaataagctcttgattcttagtggtgatgcctttgacgccacctcctgatcattctaactcctacttcgccatcgcaatcggtttgggcattggcctgtttgtattcttgctcactaggaacactctacctcacackggggacaatattcatcattttccgcacggaggtcgatacaaggacgggaccaaaaagattgattattgcggaccgagcaacaaacctgatttctactcaaactctaaaagcattccctttttggtggttctggtactagttgcgacaatcctgtttctctccaaagatttcgcaaactttagaagaaggagaatctgcttgatatgttcccaaaactgtcagcatccttctacttgacaacgatcctaacgagcgttctcactttcctgttattttccgcttctcaaccgaatgagaataaatgcactgtgatcataacgggtgaatccattcgcattttgggctgtactttcagtgaaggttttctggaatatgctaaaggcttggatgttctgagggtttagggttcctcttaggttttaaagcttaatttgataaagaatgtctacgtctgacaaacaggtaccacctccagagcaagaaaatgagagggagcgtaataggaaaattcttgaggagagattgaggaaaarggctgaggaaaccgttatcgaaactggttcaggtgattctgatgatgcgctcgaggaaagatttcgcaagctgaaagagtatctgctgaagaacatgagatccaagcakataggtaacattggcctcgaaattggaaggccagccttagaacctatgagcgaaataagacctgaccttacaaatatcttcactatgcccacaatagatattttgatcaagaaagggtggaggccttcttctaccgctgttgctactgctcagcaattgattgaaatttcagcaaaattgcaagggctcggcgtaccaccggaatcaattgcgccagttgtttgggacaccgcgatgtattgtgcaagtgctggttcttcggataagatggatccacaaggaactgtggagttccctggaggagctattactagagattcggtggttgctacaataaaagaatacacaaccttacgagccttctgccgtgcctatgccccaattgtgtggaattatatgatcgggacgaatcaacctcctgcgaattggcaagctaaaggtttcaatgagcaaacaaaatttgcagcttttgatacatttgattacatcaggaatcctgcagcaatcaaaccacttgaaggactgatacggtctccaacaaatgaggagatgattgctaatgctactcataggcagcttgctatcgataggaactcaaggaacgataggttttcgaataactctctggaggtcactggtggactgtatggttgcaaggcgaagaggactttaagaaatctgacttgtgattaacatgaagactttatgttataaagatactttaaatactgtggctttgtgcttgtatcgtttgtgtgtacctttggatattatatatttgatccaagggaaagtttatactaatactcgtttgtatgaagtcgcgaggcaatcatctataactcccttttctggaacttctaggagygctattaaaaggagagctatgcgtgagaaccgatgctataagtgtgggaaggatttccataaatataagtgtagatccaatacgactagccagcaagaatttgtagagtatttcaaagagggcccgactaggttcgacaccgaaaaggctcggactaatagcatgattatactctaccatgagaggcagcttgatcgtatggagtttcatattaataaaagaccttcaacctaatgaaaggcttagtttggttttatcgataatttaccaat

SEQ ID NO: 560 - DNA, 8386 bp, Passiflora latent virus
  source 1..8386: mol_type = other DNA
ggccattacggccgggataaacactcccgaaaataactgattataaacgtaccgttcataacagttacttgatggcactcacatacaggagtccgatcgaggaagtgttaacctaccttgaaccggcggcgcaatcactgattgctacaaccgctaccacaagttatcagcagaacgagaaggagaattttgagtggttcaactatagtatgactgcactagcgaaggaaaagctgagcaatgcaggcatttacttgagtccctactccggctacgtccattctcatcctgtttgcaaaactttggagaattatattttgtataaagtactaccaggtgttataaataactcattttactttgtggggattaaacagtttaaacttaatttcttaaagaaacgtagtaagcatttagacatgttgcaatgtattaatcgttatgtgagtagcgcagataagattaggtatggtaatgaatttgtagttaggagaagtacagaatctagagcactgagaaggcattcattagttgagcagtctgatacacttagggatctgatacccaacgtcccaggttactccaacctattccttcatgatgaattgcattattggagtaaggagcaattgattacgttcttagaaatttgcaagccacaagtcatgctgggtacccttgtgtaccctacagaaatttttgcaggttctaagaattcattgaacccctggtgctacgagtatgaaataaagaagggtagattgctctactacccagatggggttcgaagtgaagggtacgaccaacccctggaaggcggatttctgcttacggccaacaaaatacaattactcgatggcactgtgtattgcgtcgacatcgtgtgcagcaaattttcgcatcacctcgttagcattacgaggggtgattttgttgttcccagctatagatcgtttgggccatttgaagcagtacattcaggccctctgaaagatatttctagagcagctggggaatgcttcccagtgtgctaccatactgtgcttagagagtacaggtacttgaggtctctcaagaagccagatatccaatcagccatggctaaattttcacaattgagccacgagccttcaggcgctgcgatcaaattcatggaagaactgagcaagctaatcatagaaactggggatgtgaggaccgtaatccgccctgaattagtgacaacattcttcggaaatttgggtagagcgctgccagctattattgcatccaaaatcaaatcgaccaggagtgtctgcttggatgaattcataggtacgttgaggccactcagtgtagatttgaagttgataactgtgacccacgcaaccgagattagagtgggtctagatgagtgcgaagctgaagagggagtggaactagttgaaatgatcgatgaaagatgggagggccgcggctcagcattgttcgaaagagcaagaagtccttacagcagcatggtcccactgtatgattgtccgaagcgctggaaagtcgcgtgtgcaagaacttggctgctaaagttgtactggaagcggtatgtaagtgcctgtttttcggagcaagtggggttcagcatgagtgtgggtgagtacgtaggcgcggctctgaacagggcgaaaatgattggtctcgcgcccctacttttagcgactcgggcattagggaaaaggcggggaaatcgcagagattggccgaggcccaaaccaactttgccctatgattgcagtgtccagtgcttgctacggctttccgccaacggagcttggattgcttttcttgagtggcatggacatggcgaaagaaaggtgccgaacacgcccggcagaggcatgatccggggaggcattaggatgacctttttcgcaagaattgcgactttttcgaagaattgtacccttcgtatgccaatcaaacagcccctccgtgcagcacagggcccgtatcactttcagcgcatccttgtatttggggaaaccggagaagaaaggaagtgtagcggggaagtnattgaatgcctgtgtaattcgcacattcctgtgaattctctacttcacgatggggattgcagtgtggagttccctagcaaattggaaggccgtgaggtggcttggttttccaagggtgcggtaccatacaggtgcgctggcagcgaactcaaatcactgggttggcctctgtggctcacgccctggttagagctgaatgggcttccgacgaagtatgactgtatgctggctcaaaaatatgtggaaggggcagagacaggattccatagggatgatgggacccttttcaaggttgaggaaagtgtactcactgtcaatttgcttggtactgctgaattcggcattgaatgcaaaaacggagcagtttggagaaatcttggccatggcgattattttcagatgcctgctggtttccaaggaagccacaggcatgctgtgcgaaatacttctgcaggtcgcatttcctacacattcagagtacttaatgagttaaagagtggcgagattggtgaggcttgcaggccaggtggggaaaccaagaatgagggtggtgagcaatttgaggcctcaattgatggggttaaagtcacgtaccgcccactatcacgcacgaggaagtatagaatcattgggaattcaggtggcggcgattgcttctggctagctatgtcttattttacgggaattaacgtgctggacatgaaagaatctattctgagcagtacttcgcagcacgacaagaggttgcgtgagcagatgggattgaaggcgtgggccgaggatgaggcaatcctggctacttgcaagaaattgggctacgatattcccatgattgatgaagccaaaagtagagatgtggttcgagccaatggtggtaataccctattagccactttgagattcacggggaaccattttgaagctattatgccgattgaaggatgcaccattaaagcacttgcagactgtgtgaagcggcaagaaaaggaggttttttcagtgcttgcgcattcaatgggcagggagtttctgagagaagtacttgaaggtaagggggtgagcttggagcagtttgccactatgtgcaataccctagacgtaagagcagttctagagctcgaggagggtacaatgttggtgaatgaagttggacggatcgagggttactttagcctgcttgagggtcacgcagtttttaaaaagggcaaaccgttagcgagacacacgcaaacgaatgtccacgataaggagttggctctaacagatgaggagctgctaccaatttcgacggtcagcacaagaatagagttcaagccaagtaaagttcgtgcaggcttattgagcgattgtttacatcagggtagtacaggggtactgtgttcagaattatacaacaatcgaaaaccccttatgcctgaagagccgcggttgggcgctagggaaatacacgttgtgcttgggacttttgggtgcggcaagagcacactgattcgtaaggtgatgtgcaaagcccgtagtaaggcaatcatctacatctcacctaggaagttcttgtgtgatgattttcagaggagtatagaagagatgaaaatcgagttcgggaggaaagctggcgagctttttaggagcctcacgtttgagaaggcctcgttgcaggcgagcaaggtgattcctggtgcgttagttatgcttgatgaaattcagttattccccccaggtttcgtgtctttgctttgctgtctcctccatgaggaggtcaaattagcattgtttggtgacccctgccaaagtgattatgattctgagaaagatagggctgtgttgggcgcgttagaatcggacattgtggatataattggagacaggagctacaattacaataccaccagccgtcgctttaggggtgagttgttccgaggacgattaccatgtgatcatgcggaaccgccgagtacgagtagcaagctggtgatcatcgaaggcctcgacaatgttgactgcacagcggagagtagcaaagtgtgtttggtctcatcctttgaagagaaaaagattgtccaagcttactttggggcaaaatgcaaggcgctaacttttggagaaagcactggtgccaactttgatcatggcacaattttggtgacccatatatctgtgcacacaaatgagcggcgatgggtaactgttctgagccgcttcagagaaagtgtcgtcattgtcaatgctgtgggcataagcaccgaattattggcgaaagtgtacgatgggaggagctttggtcatttccttaagtcgagcgctaaagttgagcaactactcccactgttaccaggcaaacctgtattcacacatggtttcattgcaaatcggtttggggctgatgaggggaagagagaagaaaagttgcagggggatccatggctcaaaacaatggttgatttactacagatagaagatctatctgtggtagaggaggcaaaagtagtccttgagagtgagtggtgcaagacccacctacctcagtgtgatctcgaaggggttcgagctcgatgggtacacaaaatcctcgccaaggaatttagggagaaaaggatgggttaccttgtgtcagagcagttcactcatgagcattcaaaacaacttgggaagcacctcacaaatgcagccgaaaggtttgaaacaatataccccagacatcgagcttcggacacagtgacttttatcatggctgtgaggaagagattgcggttttcaaacccagtgaaagaagcggccaaactgaatcaagcgatgccttacggcccatttttgctgagtgagtttttaaagcgtgtgcccctgaaaccgatgcatgatagccggatgatggctgaggccaaatttgatttcgaagagaagaaaacgagcaagagtgctgcaaccatagaaaatcacagcaatcgatctatgaaggaatgggcgatagatattggccttgtattctcgaaaagccaactgtgcaccaaatttgacaacaggttccgtgacgcaaaagctgcgcagactattgtttgttttcagcacgccgttttgtgtaggttcgcgccatacatgcggtatattgagaagaagttaaatgaggttctgccagagaagtactacattcattccggtaaaggtttagacgaactgaatgaatgggttaagaggggtggatttggccgcgtctgcacagaatctgactatgaagcctttgatgcgagccaagaccaattcaccgtcgcatttgaaataagtgtcatgaggtatttgggcttgccacctagcttgatcgaggattacaaattcatcaaaactcacttgggctctaaattaggcagtttcgctattatgcgattttcaggggaagcgagtaccttcctgtttaacacgatggccaacatgctctttactttcctccagtatgatctcagaggggatgagcgcatatgcttcgcgggagatgatatgtgctcgaacaaaaagttgcacgtatccgacaaacatagctctttcctcaaaaagttaaagttaaaggccaaggtcgcgcatacggatagaccaaccttttgtggttggaatctaagccccgatggaatttttaagaaaccacagttagtgcttgaaaggttatgcatagccaaggaaaccaataacctcattaattgcattgataactatgcaattgaggttgctttcgcgtaccaaatgggcgagcgagccaaaaattacatgactgaagaggaggtggaagctttctacaactgcgtgcgcataattgtgaagaacaaacaccttctcaagtcggacgtgcttcaagtgtatcagacggatttggtaatgtagcttaggttgtagctttatagattgcatatggatgtgttagtgtcgtacttaaataaatataagttcgtgcgtttgtgtagtaatataacaccgccaataattattcatagcgttccaggtgctgggaagagcagcttaattagggagattattcgtgctgaccctcgatttgtggcgtacacgcaggggcgtgccgatccagtgagcatcgaaggagtgcagattcaaaaacaaccagcaacaatcccatcaggagcttcctttgttcttattgacgagtacattgagaaggggctcccagagggtgcgttcgcagcatttgcggacccattgcagggtggttctggtcgagtgttacgcgcccacttcatcaagactgaaagtcatcgcttcggcaagtgcacggctcaactgcttcgagagttggattttagtgtgacggcccacggggaggacgtggtgcaaattcgtggaatttatgacgtggacccaagagatacagtaatctattttgagcctgaggtgggaaatctgttgactgcgcattccattgaagcgttttgtatcgaagagatacgcggtcaaacatttgaaagcgtgacgttcgtcacttcacaaagcgcaccaatcgacagagcaaaggctttccagtgtcttacaaggcacagaaagagcctactcatactgtgtccggatgccacttacaccgccgcctaattatactcaggtttacgttgccgttgccataggtgcgtccatcgctttagctttaggattgctaactcggaacacactccctacggttggtgatttgcaacataacttacctcacggcggaacatatagggacggcacaaagtgtgtgcactatttcaaaccagcaaaactgaattcaattgaaccacgcaattcttggggcactcaaccttgggctttagttatcattctaactgcgttgattatcgccttgagccggaagtcgaatgtctgtgctacatgtggtcgtcatcactcatgatatcggtagggttggtgagtttctgcttgacctggctgataatggggtcctggcagagggaaagttgtctcatggttctaactggaaaatctatacggatacaggggtgcaatctgtcaccagaacatataagggccttgagccaactcaaagcacttcaagtgagcctttaggtgtgcaggcagaggatcgttatatactgcatcttgacattatgccaccaaaggaagcaccagaagtggtcccgccgccggttccaccaccattgccaatgaaggaaaaggaggcttcaagttcttctgagccaaacgatgaggagttacgccagcgaagattactgaagttaattgaaatcctgcaggctcagaatcacaattcaaaccttaagaacgtatccttcgaaattggtaggccttctcttgagcgaccccccgcaatgcgtagggaccctggaaatccatatgggaggttctccattgatgagcttttcaaaatgaaggtcgatctggtgtcgaataacatggctactacggagcagatggcaaatattatggcagatatagcgggccttggtgtgcccaccgaacatgttacctcctgtatactcaagatggtcatcatgtgcgccagtgttagtagttctgcctatctggacccggatggaagcgtagagtttgagggtggtgcagtgccagttgattcaatagctgctatcatgaagaagcattcaacgttaaggaaagtatgcaggctgtacgctccgctggtttggaacagcatgctagtgcggaaccagccgccatctgattggcaagctatgggtttcccttacaatgcgaggttcgcagcttttgacaccttcgattatgtgaccaacaccgctgctatccaaccagtcgaaggtataatcaggagacctaccgcagaggaagtgatagcacacaatgcccacaaacgcctagctttggacaggtcgaatagaaatgagaaattcggcaatttggaaacagagtacactggtggcttgcaaggcgcagaaatagtccgcaatcatcgaaatgcaaacaatgggtaagcattccaagtgcatggaagctattatatttagtttaataagtgtgttgcctatagatatttgcgtgtgtatagctttgagggccctcaagaccgagcctggtttcggcagatcgagttacgctcgacgccgtcgtgccaaagctattggtcggtgtgagaggtgttatcgagtctaccctcctatttgcaattctaagtgtgataataaaacttgtgtgcctagaatatccagtaatgagcgagtggttcaattcattaaatacggagtaaccgaggtgataccgtattcgcaatttaacgagaaccgagttctgcctaaatcctaaataatatataagggtgaaactataaaaataatttgtttttaaaagattttagc

SEQ ID NO: 561 - DNA, 8041 bp, Pea streak virus
  source 1..8041: mol_type = other DNA
ataaacaaccaacaccccctcaatctttttaaaataatcctaagatcattttaaaaacatctaaatggcactcacttatcgtagtccattggaggaagtgttgggttccttttcttcttcagagcagagcttgatcgcgatcccagccatagcgaacttaaaaggagtagaacaagaaaaccacagtctattcaattatgcgctgagcccaatagcaaagcaaaaattgattagtaatggtttgtatctcagtcctttctcagctatgcctcactcgcatcctgtttgtaaaaccctggagaattatttactctacaaagtcctacccaattatttagatcacaggttttacttcgtggggataaaagaaagcaaaatcaatttcttgaggagtagagagaagaaattaaacctgtgcgaggtcgtaaataggtacgtgaccagtgctgacaaagctcggtatggttcagaattcactatcaggaggaccctggatagtgataatgagattaaatcaaagtatgggcgactaccaccaaatttggtcgatctcatacctcaattctcaagtaaacaaggtctgcacctattcctacatgatgagctgcattattggactagggcagatttacgtctctttctcacagcgtgcaaccctatcaagatgttggcaactgttgtaataccaccagaattacttattggtgctaccgaatcaatgaacaaatggtgttacacatttaacgttgaggatgatgaattgttcttctttccggatggggtaactactgagggttattcccaaagagcggattgtgctgatctactcacgctatcaaagattatacttgatgatggaactacatactgcgtggatattttgtgctcaaagtttagtcatcatttgattgcaataacccgcggggatgccatagtgccaaaaacccggacattctcaaattttgaagctgtgggcacaaaagggattgcggatttgatggagggtaatgtgcagtgcttgccaatctcctacaccacaatatcgaagattgagaggtacttgatgactctcaacaagccagatgtccaatctgccattgcaaagctaggacagatcgtgcaagagcccagcgctttcgagataaagtttgtcagagagtacgccgcattgcacatcagcaagcgaggattgaatagtctgatattgagggataattgggcaagagtcaaagctgaattcttgaaactcctccctaaagctttttatggaaggtttgacactatcttaaaggtagccttggaggattttgaaagcaatctggcgcccttgtcttttagagttagattagaagagtacggtagtgaatcacttactaatagattagatagttttatttataggactggaggtgtggctgccgtagtgaatggactaattgagctatttggcccaataaataaatctgatcgcaaaagtagcccttactctgacttttattgtgctgaattatttgtagtaaatagcggcactttgcgtaggagtataattgatatgttgaagcggagttattctcacaatgcgctcatggagctgagcccttatagtttcttcaatttgctcatcgagagggctgaaggaaatttggtggccaggtatgttttgagtggtctgcagcctgaagatattgatgcatacataatgcgcgctttgtctgagttgcaagaagaggctgaggagcagattctggatagaaagctactcacacacttggagttgagcgttgaagttaaagctgatccggaaaagagtgatgaggaggaggtggaggaagtcggagaggaaaagccttttgaaagggctgtccaccatatcgattgcgaatgtggcatgaagtttgaatgcgggaaaactatgctggttgatcatgctagagtaaatttcattgatgatttgggcaataggcaagcggtcttcttcagtaagtgccaggttgattataggtataatggtggtgcgcatgaagctgttgagtggcccgagtggttgaatatgctcttggaatgcaatggctttgatccggaagagtatgactgcgtgctagttcaaatttattcaggaggttcaagtatcggttttcattctgatgatgaagcgattttccctaaggacgggaaaattctgaccatgactacaggcggggatgcggacttttcactccgatgcaaagaaggaggctttacatttcgttttgaggcgaacacctacttaatcatgcctgaaggttgccaaatcagtcataaacatgccgtaagggattgtgatcatggtcgtataagctacacctttaggcaattaaaacaatgcagggagtatatggagcgtgagtgtgaagttacttcaagcatcgatccatcagatgatgaccaaagtgtagagatcattaccttgcatgaggttgagatcaagcgtggaagagatgcggataagcaggctttagaagtgattgaagtgcctggtgatggaaactgcttctggcactcattgggttactactttgggctagagggtaggtcgctgaaggagataagtttttcgcggttagaagagatggattgggacttggaacccctcaaaaaacaaatgagtggttatgagttctgcgagttggaaagtattgttgctgcagcaagattgcacagtgtggagatagaaataattgatcacaatagttctatggtttgggtgttcaccccaaaaaataacttaaggcagtatgctaggatgcaacttgttggagaacattatagccccgtgattccaaaagaggtttgtgtgctaagagctatagcagattctttgggaaagtctcttcaagacatccatagatgtctcaccaaagctgagaatcgccacctccttgaactcgttgaatcaggtgaaggtttggaagtgtttttgattgagcctttcatggtcttatttgggatcagagcagtgatcgataatgatggggacctaattgttcttaacgcaaaaggcgctcttgagagattcttccaaaattacggagatcacctcacccacgtgagtaaggataaaattgtgggtttggagcggtttggtgagtttgagggccagggtgttgaaaggaactccctcgcggcgctcaagtctgcaggcacggaactgatttatgaagctaagaaggatagggcagacatcctttgtgagagtttgcactccggattaactggagtaatctcttcaaaattgtacaatgatcaaccattgatccaaaatcccgggccgaactctatttgtaggagtttaactgtcattttggggactttcggtgcgggtaagagcactctattcattaaattccttaaggcgaatgaaggcaaaagagtacattttgtttcaccaagaaaagttctcgcagaggaaatcagatccaatatggcacgagctcttgggtatgagagtggacgaatgggtaagagtgggaaattaaagagcaaaaattggtttgtgcacacttttgaagttttcctacttaaaattcggagcctaaaagctgaggattgtgtagtcatggatgaagtgcagcttttcccacccggttatttggattgtatgacttaccaactgaatggtaagtgcgagttgatcgctttaggtgatcctgcgcagagtgattatgataatgagaaagacaggaatatcctttgctgtttaggttcggacatagagcgggcactggtaggtaatgagtatgattacacgattggttcatacagattccaaaacaggaattttttgaacagattaccttgctcttttatgcatcagagcttggaaatcgatgagccttacttgatttttgagggtgtgggcgagttcctcaaggtcttcaccgagtaccggtcagtggtgctagtggctggtttcactgaaaagaagcttgtgagggcttattatggtcaggaatgcagagttctgacttttggagagtcaacaggtctaactttcgatcggggtttgatcattataagtgctgattctttaaaggtcaatgagaaaaggtgggtcacagctttatcaagattcagacagaatttagcccttttgaacttaactggagatactctggagaaccttgtactccggaaagccaattcaatgttagctaactttctgaaaggctcaagcaaagtcgagaacctcaaggaaattttgcctggtgtaccgaagttcaaacaaacttttattggaaaggtaggtaaagatcaaggcttggttgaagaaaaattacagggtgatccttggttgaaaggtgaattatttcttggccagactgaagatgcagaggtgatccaaataaatgaattcatggagcaggatcagtggtttaaaacccatttgcctcgctgtgagatggaaggggtaagaagcaggtggctgcatttgctgcttgagaaagaagcaagagaataccgtttcagagatatggtgaccgagcaattcaccgatgaccatgatagaggttgtggtgagaaattgaccaatgcggcggagcgttttgaggcgatctacccgaggcacagagcttctgataatttaaccttcttaatggccgtcaagaaaagattgagattctctaagccccatattgaggaagccaaactgaatgaggccttgccgtacggcaaatttctattggatgagttcttgcagaagatacctctgcgagcaactcatagacctgaccttatggctgaagctgtgcaggattttgaggagaagaagagaagtaaaagtgctgcaactatagagaatcattcaggcaggtcctgtagggattggttggctgacgttggtttagtgttttcaaaaagtcagatttgtacaaaatttgataacagatttagatgtgccaaggctgcccagtcgatcgtttgtttccaacattctgtgttatgccgatttgcgccctatatgagatacattgaaaaattgctaggggaggcacttaaaaaaaccaattactatatccattctgggaagagattggaagatctggatgattgggtcgtcaagggtaatttttcaggaatttgcactgaatctgactatgaagcctttgatgcttcccaggatcattggatcatggcctttgaattaacactgatggaacatttggggctcccaaaagatttgattgcggattatagatacattaagacgcatttgggctccaaattgggagcctttgcaatcatgcggttctcgggggaagctagtactttcctttttaacaccatggccaacgcgcttttcactttcttgagatacgacactaggggtgatgaattcatatgctttgctggtgatgatatgtgtgcctcaaaacatttgaaggtcagcaacaaatttgaggatttcttgtcaaaacttaagttgaaggctaaggttcaatttaccaaaaacccgacattctgtgggtggtcattattacctttcggaattttcaagaagccccaattggtctatgaacgcatctgcattgctagagaaaagaagaaccttcacaattgcatagataattacgcaattgaattgtcgtatgcttataaaagaggggagttagcagtcaatgctatgaatgaagaagagactgatgctttttacaattgtgtcagggtcataatcaaaaggagccacttgctgaaaagtgatgtcaaggatatctttctcaatgcgaaatccctcatggaaagtctgaattaagcttagatcatcgctagtgtggtttgattagatggatgttttcataaagaatttaatagagtgtggttttcgtaggaataaggttgtgtttgacttacccatcgttgttttagctgttccgggtgcgggcaaaacttcaagcattagaaggttattgcgcgaggattctagatttgaagcttggactttcggagttcctgatcatcataattgttctggtagattcattaaaggggtgactgagagttctgagcctaatcctgataaattcctcattgtggatgaatttcaaagaggtgattgggaaaaattcaaaccttttgctatcttcggagacgttgcgcaattaatgcttaagaataccgcttcctttgaaagcgtgttctccaagtgttcatcccatagggttccctcatccgttgctaagttgcttcaggaattagacttcgaaattaccagtgagcgtgaaggtgttttggaaatcaaagatcttcttggttctgagccggaaggtgttgtgacctgttttgaatctgaagtttgtgatttgctcgattacaaccaagttgatcataaaaaccccactgaagtcatcggtttggaatttccgattgtgtctctggtcatctccggtagagcggttttggaggttcatagagctgaattctacatttgctgcacaagagcgacagataaattaataatcatatcacctgagccggagcagttccatagaggcacacatgccattgatagcacctcctaataattctaattcttatctagctctggctatcggtgctggttttgcaatcatcatcttcacccttagatccaatcaattgcctcacgtgggtgataacattcattcattgcctcacggaggtttttacagagacgggacaaaggtcatacaatataattcccctgtgaggacgccaaacaactggttcaagggacctaacaacattcaggctttagccctggttttgttggttattggtctgattcatgcgtcatctgtaaagataagtcggggatgcagttgttccaagtaatcctaagtgtgttttcctgttgtgcggttttgttgtgcttgtatactatagattcgtttttaaataattctgtgtgccagtgcactgtggtgttaactggtgaaagtgtcaaaattgtcgggtgtgaatttacaagtgaattcattgagtacgccaaaactttaaaggtgcaggcaatttgagtatctttaagtttgcagagagtgtattcgataaagatggcagagcaacagaaagcagctgaggagagggctcgcatagatgcgaagttgaagcagcagctggagcagcagagttccaaactgggagctgagaaagagtttattaaggatgctgagggtctacaaaaatctttacttgagcggttccaggccttacaagacctcaccgctaaaagcattgcaggttcttccatcgttaatggtggttgggaagcggatcggaaaagactcaaagtttctgacaaaatgaagctagatggttccaacattttcacaaggccaacattggacgatctgcagaagctgggctggaatcctgaggccaaccaggtggctactgctgagaatctggctaaaatcagtgcgaaattgaaggaattgggggtcccgcctgaacagatggcaaggactttttgggatgtggctatgtattgtactgctgtgggtgcttccaggtacactaatccacaagggtcaattaactatcctgaaggttcaataactagagatgcggtctttggagtcattcgagagcaatgcactctgaggcaggtttgcaggagcttcgctcctatcatctggaactacatgcatgttaataatatgcccccaactaattgggcggaaaagggtttcagcaatgatgtcaaatttgctgcttttgatttctttgatttcgtggagtgcccagcttcaattcaaccggcggatggtctgattagacgtcctacatctgatgagtatgttgcgttcaacactcacaaaaagtgtgccctggccagggctgacaagaatggtcgttatgcgagtactgatgcctctgttactggaggaatgttcggttgtggagccaaagagacttggcgtaataatgcgtgctgaatgtgtgtgcggttgctagtaaaacctaaataatgtataagctagaacctataaaatcaagtgtgttttaaaatatttttaatgcttgt

SEQ ID NO: 562 - DNA, 538 bp, Sedum latent virus
  source 1..538: mol_type = other DNA
ggcgcggatacgtcctttcattatggcagtgcggaaagattgaggttctcatgcccagttaaagaggctgctaaattgagtcaggcaatgccctatggcgcgtttttgctgcgtactttcctggataaggtgccgctcaagccaatgcacaatgctgtcatgatggcagaggctaagtttgatttccaggagacgacatgtgataaaagtgcggctaccattgagaaccacagcaacaggtccatgagagaatgggctatcgatattggacagatcttttcgaagagtcagctatgcacaaaattcgataatcgattccgggatgcaaaagctgcacaaaccattgtctgtttccaacatgcagtgttgtgccgtttcgcgccgtacatgcgttatattgaaaagaaactctgtgaggtcttgcctgaaaaatactacattcattctggcaagaaccttgaagagctcaatgaatgggttgtcaagggcccattcgacgctctttgccacggatcaaattatgaggctttccacgcta

SEQ ID NO: 563 - DNA, 8363 bp, Shallot latent virus
  source 1..8363: mol_type = other DNA
ggataaacaacactactcaaaacaagacgccactattctaacaaaacagagacgtctcgtaatggccctaacttacaggagtccagttgaggaagtgcttacaagcttcacaacaagtgagcagagtgaaattgcgcgcggagcagtccagggtttgctaaagttagaggaatttaaccacaatctattcaatttcgcattgagtcccatcgcgaaacaaaggttgtgcggtagcggaatctacttaagccccttctcttacgtgccccactctcatcccgcttgcaaaacgcttgaaaattacaatctttatcaagtcgtatgtccattaatagatcataggttttacttagttggtatcaagcaatctaaattgtgttttttgaaaggtaggaataggaaaatggatatggttgaatgtatcaatcgtatggtgaccagtcgtgacaagttgcgctacggtaatgattttgtggtccaagctggtcaacccgggactgttaagaagaatagtagaaccgtaaccttttatcctgagttagctagtcttgttccacacgagatcaaatttagatccagagcattattcttgcacgatgaattgcactattggagcaaagaaagtttagcaattttcctggatcaatgctcacctgagttaatgctagcgactgtcgtgattccaccggaattgttgctcaaagctaaggagagcatgaataaatggtgctatgagttcgaagttaaaggtcctgatctctatttctacccagatggggtaagagctgaaggctatatacagcctgccggttgcgtttaccttttgaccacaaacaagatgatcaccccgggagggcaggtttattgtttcgacataataagctctaaatttgcgcaccacgttatagctatcacccgcggtgaagccctggtaaagaaagagaattcattttccaatttcgaagctatcggttcctcttttgccagtaaattgctacatgatgaatatccatgcttcccaattagttacgaagtagttatgaaattgtatacttatctctcttccttaaactcacctgatgtgaaatcagccgtggctaagttgcgccagttggtcgaacacccgactgcctttgaagtccaattcactatcgaatttgccaacttgtacattcgctgcggtgtaaatctagatattttcacgccaagcaccaaaacactattactgaaaagcttggctgtgcttatgcccgcgctgctgaccaaatattctaaaaaattaatgagggtcagcttcaccagttttgtgagccatctgaagccattgagcttcaacgtgaaatgtgaaacaatcgaccttaaaacgcatgcaaaaccttgctatgacaggcttattccgcctggaattgactcgctaatgaattgcctggaatttgggaaaatcacttctgggaaagagaacttctctagggagccagccccttacagtttttcattaaatgaaacgtgccacttacattgtgctcccgaagaattgcttatagcgaatatgaaattccttggcgatctagaaagcttcaccttctctagcacagatcaggtacttgccggggctgccactgtgtttagaccgttgtatcaattcctctttagcattctgggggaatactgtgtggactactgtctgatgcaggccgcccgtaaacagcgcatcgagaaaaatgagcgcacagcggcgaaggttctcgcactcccatggttctccaacgagtcttatggggatgtgacggtgtaccctgcacctgtgtttaattgcttagagcatgaagaagaaaactggggtgctgctgacacggtcgacgatattgagcccatgttgctaaatcttttcaattgtgtttgtggggcgggtatacagtggactgtggcatttcacgtagaattgcttgatgtcagtattgatgatcgtttgctcaatcgcagagctgccttttatagtaaggggtgctttggttacagttataacggtggaaatcacgttggtcatgaatggttagataatttcgactcttttctggcgatcaacggtcatgatcttaattatttcaattgtgtgcttttccagcagtatgatgggggtcacggcattggattccacagcgatgatgaggaactctttgagaaaaatagtaaaattcttaccatttgcattcaaggagattgtgaatttcgatttcgctgtgccacaggtgaaacaggtttcttcatggaggctccaaaacaatttatgatgcctgaagggttccaggagagccacaaacatgcagtgcggggttgttctcctggtcggattagtgcaactttccgtagggcaaaggttccacctgttgatgattttttaacctctgaaaatggaaaagtagattctgagaacggtgtggatgatggtggcgagtcagagtgtctgagcttcatagataatttgggcgtttcccacactgttcagaaaaatgtcaacatcgcaccttttgttgttagggaagtgagtggggagaataacatgtgcttctggaattgcctctctttcttacttaacctggatgcgctcccacttaaaaacaatctatccaaaggtttggaaaaactcaggggaacaactatacatgctactctggctgaacaattggcccctggagcaatggcagaagatgacgttatttctctttgttgtcaaattttttcattggagattgtcgtgcatagcttgagtctagggtgcaccactaactttgcgaccgaagatgcagagaagaggattgatatcctgcatgataatgagcatttctcactgcttttttataagaacgattgttttgtatctgcagtggcgcaaaccttttcgcgtgataccaatgaaatgtacagagtgctggcggacaaaaaatttgatgaactcactgaattgttgcgcttaggatgcggtttgaccattgaggatttggaagtaggttttaaactgttgaacattaaagcccacattatgaaagatggggagtacttgcagattaatgattcgggggagatcaatggtttctattctttaactgatgaacatcttgtggcttgcccacctttcagcaaaagcttattcgctaccaaaaccatcctgaattctaatgagcatttagctgtgactgccatcaagatgctgcgtgaagtgggttctgaattgatttatcccgcttcccttgatagagcttccaattttgagaggagtcttctcaagggttgtactggcattcggtcatccactctctttgcagggctttctagcagactcaaggaagggcacaatgatcatgaacgttcactgacaactgtcttgggaactttcggttctggcaagacaagcttgattaaaagggctgtcgtgaattttaagaagagcggtcgcgtggtgcattttgtgtcaccacggcgttcactcgctgatgctctcattcagtcattgggacttactgaccggtcgggcacttgcattgacggcaagggagggagtaagcggaaaggcaagaagagctcacaaaacactttcgtgagaacctttgagacctttttgatccaaaattcgcgcgtcgggggtaatgatctggttttctttgatgagattcagctcttcccacctggctaccttgactacacccccatgttgctccctgcaactgtgcagtttttcatactcggggatccactccacagtgattatgacagtatgaacgataggcacgtcttcctcggttatgaatcggacatttgtaatctactaaaagggagagaatacaagtacaatatattgagtcgccgtttctccaataagatgtttgcttcccgcttaccctgttctttcaaatctgaatgtttcaccactgatgagccctacgtcatgttacagggctttggggccaatttggatgaaattaaaaatttctctgaggtttatctagtggccagtttcgtggagaaaaattttgtgaaggctcatttgggcgagaatgttaaggttctaactttcggtgagagcactggtttgacattcgagagggggtctgtattcattaccgaaagcgcatttaagacttctgaatgcaggtgggtgaccgctttgagtcgtttctctagaaatttaatcttgatcaacatgctcgagactacctttgaatctttggcgagccaaaggtccaccacagtcttggggcgtttcctgagaggtaccgcggatccctcccatactctggaaaatttacctggtaagccaattgcgcaatatgggttcacacactgtgttggcaggaacttaggggtccgtgaggctaagctgcagggggatccttggctcaagagtgagatcttccttggacaagaggatgacatgcaggaaattgaagaagttgctgagttagtacaaaaggagattttcaaaactcatttgccacgatgcgatttggagggtttacgcgcgcaatggaatgataagatactgtccaaagaggcgcgggagttcaaatttcgcaatctagttacagagcaattcaccgattgccattctaagcagaaaggtaaaatcttaactaaccaggcagaacgttttgaaacgatttaccccaggcatcgtgccagtgatactctcacgttcctaatggccgttaagaagagattaagattctcaaaaccgcacttggaatgcgctaagctaaaagaggcagaaccatacggtaaatttttgctcgatgaatttttgaagagaatccccttgaaaccacaccacaggcatgatctaatgtctgaagctctccatgattttgaggaaaaaaaagtgagcaaatcagccgccatcattgagaatcacgctaatcgatcctgttccgactggttggctgacgttggtctggtgttctccaaaagccagatttgcactaaatgggacaatcgctttcgatcggcaaaagccgcccaaacaatcgtctgctttcaacattcagtgttaataagattcgcgccttacatgcgttacattgagaagaaggtacttgaggttttaccaaaaaagtactatattcactctggtaagggccttgaagagctgaatcagtgggtgtgcgacaataagttccatgggatctgcactgagtctgactgtgaagcttttgatgcctcccaagatcaatacatcatggccttcgaaatcgcactaatggaatatcttggtctacccagatctctaataaatgattacaaatatattaaaacgcatctgggctgtaagatgggcgcgctggcaatcatgaggttctctggcgaagcaagcacctttttattcaacaccctggctaacatgcttttcacgtttttgaggtatgatctcaatgggcaggaaagcatttgttttgctggggatgacatgtgtgccaatcgtcgattacgtgtcaatctcaagcatgaggacttcctaggcaaacttaaattgaaggcgaaagtggctttcaccaaaagaccaaccttctgtggttggaatttaacccactttggtatttacaaaaaaccgcaattggtttttgagcggatgtgcatcgcaaaagaaactaataatctgcacaattgcattgataattacgccattgaaataagtttcgcctatgtgaaaggtgaacttgctgtctgccacatggacaaagaagaactcgacgccttttacaattgtgtgcgtgtggtagttaagagcaagcaccttctgaagtctaacgtgcgagaactttttaagaatgaagttgaaacttgagcttaggtattagctatattattgatatatatggatgtgttttgtaaagtgttaattgagtgtggttttagtagattagacggttccggtaacaagtgtaaagtagtattaggagtacctggttgcggtaagagtagttgtatccgtagattgattaacactgattctcgcttcatcgctgccacttttggcacccccgacccgctaaacgttaccgggaggcgcatacggtccgtcactgaactctcagcgactgagcttaacgggaagttacttttgcttgacgaattccagcaaggtgattacgaagaccttaaaccttttgcactttttggggacgtgtgccaattcttcgattcaacaaaaccgtaccctgttgctgactggtgcaaaactgttagtcatcgcgtgaataaattcacgtgtgatttcttgcgggattttggttttgaaatcacctcggacgtttctggagtcttagagttcggtgggctttacgatagggaattacagggtgtggtgattacctattgcactcaagtctctgcactactgaaagctcacggagttgaccactatactgttgccagttgtcgcggttctgaatttgctgaagttactctctgcttaagtgatcgcgtggtgcctaaggaggacctcgctaagttctacgtttgtgccactcgaagtcgcggaaatttgctaattttgacgcctgatgcctctgagccctccacctgatcatactagaacctattttgctggtgctataggtgtttgtgttgctctttgtttgtacactcttactcgttcaactctacctcacgtaggcgataatatacatagtctacctcacggcggttgctatcaagacggcactaaaagaatcttttacaaccgtccggccaagaacttcccaagcagcaatttacctttgagcttcacttccccagtccttttactcggaattctcataggtctgattttcttgagtgaaaaaattaggtccagctcgcggacgcgtatgacatgcagttgcaaccactcatagctctgctcattggtctttctgtgacactgattatttgccttacctttgatagtattaggactgagcggtgtactgtcatcatcactggggaatcggtcaaatttctggggtgtgaattcactagggatttcattgattttgccatacaagccaaaccttttggttcactttaggtttacagcgctctaaattgatattatgactaacgaagaagaagagctcaacagagtaagaaacttgcctacacgcaacccgggcacagagctagaaggggaacgaagtaaggcagttaatgatgttggcgttatggaacgcgaaggcttcgaggccgttctccgtcggagtgaagatagattcaacaaactcaaggaaaagtgcatagctgaattatcttgcataaacgtgacaaattgtggatgggaatccggacgccccaaagctcagcttgctgatagtcttaaaggggatgcttcaaacatattcactcgcccctccatggatgcgcttttagtacggaactacgcacctgaaagtaataatctggctactgctgaagaattggcgaagatatccgccaaagtgcaggccctaggtgcgcctgaggagtgtttagctgaagttttctgggatatttgcatgtattgcaccacagcggggagctcaccgaatgtgaaccctaaagggaccatctctatcggcggtagagtcgtgactagggacatggtggtcgctgttatcaaagagtactccacactacgacaagtttgccgttgttatgcgcccgttgtctggaattacatgttattgaatgagcaacctcccgcgaattgggatgcaaaggggttcactgagaacacaaaatatgctgcctttgacaccttcgatgccgtgactaacaaagctgcaatccaaccgcttgaaggcctgataagggctccaactgacgctgaacgtatcgctttcgcaacacacaagaaattagcccttgccaagaattcgcaaaattctcgatacgccaacacctctgctgaagtcactggtggattcttcggatgtgtccctaagaacaatttcagagagaatcgatgttgatcaagcaaagaacttaccgtagattattgcgtgctatatttaaattacatactaataagaattgtgtggatttgattgatattatcgtgagtaaaatagtgtgtgataatgccggggcttcacgctacgctcgcgctcgtagagctaagagcataggtcggtgccctcgttgcttcaggtgctcaccaggttttagtttcactaaaaactgtgattctaaaacttgtgtgcctggtataagctataatgttaaagtcaaggattttatagttaacggtgtaacaatgtgaaaccttactatgaaccttgaatagttgcccataaaacctaaataatgtataagtgggaacgaaataaaataatttgtttttaaaatattttcgc

SEQ ID NO: 564 - DNA, 8400 bp, Shallot latent virus
  source 1..8400: mol_type = other DNA
aatctaaagctcaaccccacggagcagtccagggaggataaacaacactactcaaaacaagacgccactattctaacaaaacagagacgtctcgtaatggccctaacctacaggagtccagttgaggaagtgcttacaagcttcactacaagtgagcagagtgaaattgcgcgcggagcagtccagggtttgctaaagttagaggagttcaaccacaacctattcaatttcgcattaagtcctatcgcgaaacaaaggttgtgcagtagcggaatctacttaagccccttctcttacgtgcctcactcccatcccgcttgtaaaacgcttgaaaattacaatctttatcaggtagtatgtcccctagtggatcataggttttacttagtaggtattaaacagtctaaattatgttttttaaaaagtaggaataggaaaatggatatggttgaatgcatcaatcgcatggttactagccgtgataagttgcgctatgggaatgattttgtggtccaagctggtcaatcggggaccgtcaagaagaatagtcgcactgtaaccttctatcctgagttagctagtctagtcccacacgagatcaaatttaggtctagagcactcttcttgcacgacgaactgcactattggagtaaggaaagcttggcaatatttctggatcaaagctcgcccgagttattacttgccaccgtggtgattccacccgaactgctactcaaagctaaggagagtatgaataaatggtgctatgagttcgaggtcaaaggccctgatctctacttctacccagacggggtaagagcggagggttacatacagcccgccggctgcgtttatcttttgaccacaaacaagatgatcaccccaggagggcaggtttattgctttgatatcataagttctaagtttgcgcatcacgtgatagcgataacccgcggtgaggctctagttaaaaaggaaaattctttttctaattttgaggctatcggctcctctttcgcaagcaaactgctacacgatgattatccatgcttcccaatcagctacgaagtggtcatgaaattgtacacctatctctcttccttaaattcacctgatgtgaagtccgccgtcgctaaattacgccagctagttgaacacccaaccgcttttgaagttcaatttactatcgaatttgccaatttgtacattcgctgcggcgttaatctggatattttcacacccagcaccaaaactcttttgctgaaaagtttagccgtgctgatgcctgctttgctaactaaatattcgaagaaactgatgagggtcagtttcactagctttgtgagccatttgaaaccgttgagctttaacgtgaagtgcgaaacgattgaccttaaaattcaagcgaaaccttgctacgaccgaattatcccccctgtaattgacacactcttgaatcgcctggaattagggaaaacattctttgggaacgaaacattttctaggacacctgctccttacaattttgtgttgaatgaaacatgccatttacatggtgctcctgaagagttgctcatggcgaacatgaaatttcttggtgatttggagagtttcaccttttccagtaccgatcaggtactagctggggctgccacagtgttccgacctttgtaccagttccttttcagcactctgggggattattgtgtagattactgcttgatgcaagcagttcgcaaacagcgcgtcgagaagaatgagaccacagcttcaaaggtacttgcactcccatggtttacgaacgagtcttatggagaagagaggatgtacccggcgccagtgtttaactgtctagaacatgaagacgaaaattggggcgcagcagaagagtttgatgatgtggagcccatgttattaaatcttttcgattgcgtctgtgggacaggaatacagtggactgtagcatttcacgttgaattgctcaatgttagtatgaatgatcgtttgagcaatcgcagtgccgctttttatagcaaagggagtttcggttacacttacaacggtggacagcacattggccatgaatggttggatgaattcgattcatttttggcgattaatggtcatgatcttaattatttcaattgtgtgcttttccagaggtatgatggtggcaatggaatagggttccacagcgataatgaagaacttttcgaaaagaacagtagaatactcactgtttgcattcaaggcgattgtgaatttcgttttcgttgtgccacaggtgagacaggtttttatatggaagctcccaaacaattcatgatgcctgaaggtttccaggaaagtcacaaacatgcagtgagaggttgttctcccggtagaatcagtgcgactttccgtagggcaaaaatttcacccgttgacaaatgtgtgactccagagaatgaaaaattggactcggaatgcagtgcagatgacggtagcgagtcagaatgttttagctttatagataatttgggtgtttcacatactgttcagaagagtgtcaacatctcccctttcgtcgttcgaaaagttagcggggagaacaacatgtgcttttggaactgcctttctttcttactgaatctggatgcttccttgcttaaaaatactttgtccaaaggtttagaaaaactcagaggggtagctatgcatgcgactctggcagaacagttggccccaggtgcaatggcagaagatgatgttatatctctcagttgtcaaattttttcactggaaatcgtggtacacagtttgagtttgggatgcaccactaccttcgccaccgaagatgcggaaaagaggattgatattttgcacgataatgaacatttctcattgctcttttacaagaatgattgtttcgtatctgccgtggcgcagactttttcacgtgacaccaatgagatgtacagagttttagcacataaaaaatttgaagagcttacagaattattgcgtctggggtgcggtttaactcttgaggatttagaggtgggttttaaactgttgaatattaaagcccacattaagaaagatggggaatacttacaaatcaatgattccggggaaattaacggcttctattctttaacggatgagcatcttgtgtcctgcccaccctttagtaaaaacttatttgccacaaaaaccatcctcaattctaatgaacatttggctgtgactgctatcaaaatgctgcaggaagtgggttctgagttgatttataacgcttctcttgatcgggcttctaattttgaaaggagtcttctcaagggttgtaccggcattaggtcatccactctcttcgcgggactttctagcagactcaaggaagggcatgaggatcatgaacgtccgctgacgacagtcctgggaacttttggagctggaaaaactagcttaattaaaagggctgtcgtgaattttaagaagagtggtcgcgtagtgcattttgtgtcaccacgtcgctcgctggctgatactctgattcagtctttgggacttacggaaaaacagagtgccggtgcggacggtaaaaatgggggtaagcggaaaggcaagaaaaactcacagaacacctttgttagaacttttgagacctttttgatccagaatgcgcgcgtcggtggtaatgatctggttttctttgatgagattcagcttttcccacctggctatcttgattacgcctccatgttgcttcctgacactgtgcagtttttcatactcggggatccgcttcaaagtgattatgatagtatgaacgacaggcacgttttcctcggctatgaatcggacatctacaatctactgaaagggaaagaatacaagtacaatattttaagccgtcgattctccaataagatgtttgcttctcgcctaccttgttctttcaaatctgagtgtttcactacagaagaaccttacatcatgttgcagggctttgggaccaatttggacgatatcaaaaatttttctgaggtttaccttgttgcgagtttcgtgggaaaaaatttcgtgaaggcccatttgggagagaatgtgaaggttctaacctttggtgagagcaccggtttgacgttcgagagggggtctgtattcattactgaaagtgctttgaaaacttctgaatgcaggtgggtgacagctttgagtcggttctcaagaaatttgatcctgattaatatgctcgatatcacctttgagtccttagcgaaccaaagatccaccacagtcttaggacgttttctgaaaggtaccgcggatccttctcacactcttgaaaatttgcctggtaagccaattgcgcaatatgggtttacgcactgtgtgggcaggaacttgggtgtccgtgaagcaaaactacaaggggatccttggcttaaaagtgagatctttcttggacaagaggatgagatgcaagaaattgaagaagtcgctgaagtagtacaaaaagagatattcaaaactcatttgccccgatgcgatttagaggggttgcgcgcacaatggaatgataaaatcctgtccaaagaagttcgtgagttcaagtttcgcagcctcgttactgaccaattcaccgattgccactctaagcagaaaggtaagatcctgaccaatcaggcagaacgctttgaaaccatttaccctaggcaccgcgctagtgatacgcttacttttctcatggctgttaagaagagattgagattttcaaaaccacacttggaatgtgctaagctgaaagaagctgaaccttacggtaaatttctgctagatgagtttttgaagagaattcccttaaaaccacaccacaggcatgatttgatgtctgaggctcttcatgagtttgaagagaaaaaagtgagtaagtcggctgccatcattgagaatcacgccaatcgctcttgttccgactggctggctgacgttggtctagtgttctccaaaagccagatttgtactaaatgggacaatcgttttcgatcagcaaaagccgcccaaacaatcgtttgcttccaacattcggtattgataagatttgcgccctatatgcgttatattgagaaaaaagtgctagaggttctgccgaaaaaatactacatccattctggcaaaggccttgacgagctgaatcagtgggtgtgcgataataagttccatggaatttgcactgagtccgactacgaagcttttgatgcttctcaagatcagtacattatggcttttgaaatcgcactgatggaataccttggtctgcccagatctctaataaacgactacaaatacatcaagactcatctgggttgtaagatgggtgcactggcaatcatgaggttttccggcgaagcgagcacttttctgttcaatactctggcaaacatgcttttcacatttttgcgttatgatctcaatggacatgagagcatttgcttcgctggggatgacatgtgcgccaattatcggttacgtatcaacctcaaacatgaggacttcctaggcaaactcaagctgaaagcaaaagtggctttcaccaagagaccaacattttgcggttggaatttaactcactttggtatctacaaaaaaccgcaattggtctttgagagaatgtgcatagctaaagagactaacaacctgcacaattgcatagataactatgccatcgaaataagcttcgcctatgtaaaaggtgagcttgctgtttgccacatggacaaggaagagcttgatgccttttacaattgtgtgcgtgtggtggtaaagagcaagcaccttctgaagtccaacgtgcgagaactatttcagaacgaagtcgaaacttgagcttaggtattagctatattattgatatatatggatgtgttttgtaaagtgttaattgagtgtggtttttgtagattagacggttccggtaataagtgtaaagtagtattaggagtacctggttgcggtaagagtagttgtatccgtaaattgatcaatcttgattctcgtttcatcgcagcgactttcggcgcacctgacccgctcaacgtcactgggagacgcatacgggctgttgccgagctctccacaactgagcttcacgggaagttacttttactcgacgaattccagcagggtgattacgaagagcttaaaccttttgcgctttttggggacgtgtgccaattctttgattcagctaaaccgtacccaatcgctgactggtgtaaaattgttagtcatcgcgtgaataaacccacgtgtgacttcttacggacttttggttttgaaatcacatccgtcatttctggaagcctagaatttggaggactttacgagaaagaattgcagggtgcggtcataacttattgcacccaggtttcggctctattaaaagctcacggagttgaacactacactgttgccaattgtcgtgggtctgaatttgctgaagtcactctctgcttaagtgaccacgtggtgcccaaggaagatcttgctaagttctacgtttgcgccactcgaagtcgtgggaatttacgaattttgacgcctgatgcctctgagccctccacctgatcatacaaaaacttattttgctggcgctataggtgtttgtgttgccctctgtttgtacactttaactcgttcaactctaccacacgtaggcgataatatacatagtttaccacacggcggctgctatcaagacggtactaaaagaatcatttacaaccgtcctgctaggaacttcccgagcagtaacttgcctttgaacttcacttcccctgtcctgctacttggaattctcattgggctaattttcctgagtgaaaaatttaggtccagttcgcgaacacatatcacatgcaattgcaaccactcatagctctgatcgttggcctttcagtaacgctaattatctgcctcaccattgatagtattagaactgagcggtgtactgtcatcattactggagaatcagtcaaatttttggggtgtgagttcactagagatttcatagatttcgccacccaagctaaaccttttggttcactttaggtttacagtgctctaaattgatattatgacaaacgaagaagaagagctcaacagagtgaggaacttgcccacacgtgacccggtgacaattcccgacgaggaacgcagtaaggccgttaatgacgttgggatcatggagcgtgaaggcttcgaggccgttctccgtaggagcgaaagtagattcaacaaactcaaagagaagtgcatggccgaattgtctagcattaatgtaacgaattgtggatgggaatctggacgccccaaagcggagctcgcagatagtctcaaaggggatgcttcaaatattttcacccgtccctcgatggatgcacttttggtgaggaactacgcacctgagagtaataatctggcgacggctgaggaattggcaaaaatatctgccaaggtgcaggctcttggtgctccagaagagtgtttagctgaggtgttctgggatatttgcatgtattgcactacggccgggagctcaccaaacgtgaaccctaaagggattatctctgtcggtggtaaagttgtgactagggacatggtagtcgcagtcattaaggaatactcaacgttgcgacaggtttgccgttgctacgcgcccgttgtttggaattacatgttattgaatgagcaaccgcccgctaattgggacgcgaaggggtttaccgaaaacactaaatatgctgcctttgataccttcgatgccgtgactaacaaagctgcaatccaaccactcgaaggtctgataagggccccgactgacgctgaacgcattgctttcgcaacgcacaagaagttagcccttgccaagaattcacaaaattcccgatacgccaatacatctgctgaggtcacaggagggttcttcggatgcttgcctaagaacaatttcagagagaatcgatgttgatcaagcaaaggacttaccgtagattactgcgtgctatatttaaattatataccgataggaattgtgtgtatttgattgatattatcgtaagtaaaatagtgtgtgagagtgctggggcttcacactatgctcgagctcgtagagctaagagtataggtaggtgccctcgttgtttcaggtgttcaccgtgtttcgttttcactaaaaactgtgatactaaaacttgtacccctggtataagctacaatactaaagtcaaggattttatagttaatggtgtaacaatgtgaaaccttactatgaaccttgaatagttgcccataaaacctaaataatgtataagtgggaacgaaataaaataatttgtttttaaaatattttcgcaa

SEQ ID NO: 565 - DNA, 8531 bp, Yam latent virus
  source 1..8531: mol_type = other DNA
tggataaacaaacatacaatattcatacatactcgaacatactctactcgctacagctgttcgactacgtaccatggctctcacatacagaacacccatggaggatattgtaattgcttttgaaccacaaacacaggctttgattgcaagtagtgcagcacaaatatataaaaaaatggaggaaggtaattgcagcttctttaatttccacttgccagcaatagctaaaaggaaattgagccaagcaggcatttatttgagtccattctctgccgtagtgcattcacaccctgtatgcaagactctagagaatcacctactctacacggtcttgcccaattatgtaaatagtaagttcttttttgtaggaatcaaagagcggaaattgcagctcctcaagtctaggtcgggggcactggagagtgtgcagtgtattaatcgcttcgtaacgagtgcagataaattaaggtacacaaatgatttcgtttgttaccaaagtcgcgcctcggacgaattgttcaagcacaacccaggcttggcagagcctgccttgcgtagcttggttgagcccttgagaaggcataaggcgaggtaccttttcttccatgatgagttacattactggaacagtaaaacacttgcaagtttcttgcaggtcatggaacctgaagtggtgctcgcaacgattgtttaccccccagaattgctatttaagcaaaaaaagagtttaaatgaatggtgctacacttttgaaattttaggcgatagcctaatgttctatccagatggggtaaggagtgaaggataccagcaaccgctcattggtgggtacctgttagagtgtaataaaatagtattacgtgatggtaccacgtatatggtggatattttgtgtagcaagtatgcgcaccacttggttgcaatcactcgtggtgaggccgagagtgtaaagaatcgatcctttgggccctttgaagccacagcttcaaaaacactcgcaagactgtgtcccgagtaccctatttgcttgcctatatcctgcgaagttgtgaataaggtttatcggtacttgaggaccttgaagaaaccagatgtccaatcagctatggcaaaattaagtcaaattgtggcagaaccaacagggcaagagatagattttatagaagatttctcaaagttggtaattcaaaatgagagctttaatttgagcatcgctccagaacgcctcaaagtgtttgtgggtacgtggttggggtggctcccgggtgtgctgtcagacaagatgccctcagtgcaagctctgagtctgggtgattttatcaaagggctcgaacctttcaactttacagttaagctccgcacattgaggtgggacacactgtacgctgatgtgctcaactggtcgctggaaggtgagggagatccagagttggtggtgcggcaacttgataggaagtgggtgaatgcaccttacgaggcgatgccccaaagggttagtgcgccctactttggaatggtggagctcatagacgcaccttggaagcctctgctggaaggtctagaagagttattgctcccctttgtgaggcgtgcttttttaaattcacagtgcaatcaattcacaaggaccatttcaagagcagctgtgagtacatatgtgctccgtttgactgagagatgcagcattttgcgtcgtaaggtccgggtaggaagagagagtagagcatgtaccccggcagaactgctaggacttggcgatatggcgcaactcacaaggcagctagtggtgcgtttgcaacagcgtgccaggttcactttttgggaattggggatctcatggtttgtaaggtttgacacactcaatgtgcggtatttgagtgacgtacctatgtatgcaaaggcgcacaaggatacaatgcggatgatgggggaggttgttaaggacatactcaaaaagggaccgcgatggaaaattgatgcgcctaagagatatgcgtgcaggggagaggtcaaagttgtggatgctccaagtgatgcagcagggaaggaggagaaaggagaggacttcaagtgcctatgtggtttggttatgccagtaactaaactggaatatcctgaactttccctaggggcgcctgattcccttagggggcgcaaggcaggctggtattgcaaaactggacaggtgtaccgatacaatggtgacgttcacgacgcacagggttggccggaggagttgatgttatggtgcgaggcgaatagtatacccccgatgtatgactgttgcctgtatcaaatttacgatgaagaggctagcatcggttactacgcagatgatgaggaattatttgaggttggtagctcagtgctgactgtgaatcttcatggtacagctcagttctccatcaagtgtgcaaagggctctatatcgaggcaccttgcgggacccacaatgttcaccatgccacaggactttcagttgagtcacaaacatagtgtgcatggatgtagtagtggtaggatctcactgactttccgttgtttgcgcaaggatcttgcaacaggaggagttagtgatcgcatgattgagaagttggaggttgaagaaagtgcacaacaagtggtagaattaggcggagtgggtatcacacttcgagagagagatcccactagcaagtatgttgtgcgtcaagtccccggtgatggatcatgtttttggcatgctttgggggagctattggacgcatcgccaaatgagttaaagcgagcttgtaccaaatatgaatttgcagatcccgcactcaatgtggagctacatgagtgtgccaaagatggtgcgtatgttacagatgcaggtatcatagctgcttgtctgtgcttacaggccagaatagtggtatggaaggaggaagttggccaaatacaggagtttgtgccccaaagctccacatgtgtgctgaatttgcgtttgattggtgagcattttgagccaatctacatcaaaaatggttgcgttatctctagcattggacttgcaatgggcaggaaggagtgtgaggtcctagaggttttgcaacggaggtgcgacgatcaaatccttaaggaggtgtgggctggagaggggttgtccccctctaccatggaattggtatttaagtgctttgacgtcgctgcacatgttgaagagaaaggtcaggtatctttatacaatccagaggggagtgctcaagtgagtttcacattggaagatggtcacttaagctttaacccaaggaagaaagatcccagcacaatgatgcgaagtggtacaacgtgccagaaactgtttccgagcgctacgcttaatgtgttgaaacagaatgcgacgatgattacctatagacctgacgcgacacgtgcgggattgctcgcagatagtttgcacgatgcctgcaccggggtccttggttccgcgctattcaataataaatgcaacttgcgcacacagttttgtagcgtcgacggtgagctggtaattcacatgatagtcggcacctttggatcagggaagagtactatctttcgtgagctcatgaagcgcgcccatggaaaaatttttgactatgtgtcccccaggagggcgttggctgaagattttaagaagctaattggtatgagctgtggtcaagccggaggtaagaggaaggttgggcaggaaaactggactgttagcacttttgagaagttcttggaaagagtgccattcctcgtcgaggggcaggtacttgtgattgatgaattacaattatacccaccaggctacatagatcttgtacttatgtgtaagaaggtggacgtggagttattcctggttggtgatccaatccaaagtgattatgacagtgagaaggatcgggtggctctggccccgctggaggaaaattgtgaggtgctcttgcgtggaacaacgtacaagtataacatcacaagcaagaggtttaggaattccaattttataggccggttgccatgcactattttggcggatgaatgcactattgatgaaccttacgaattaaggttgtacattgaaaatcttaaggaaattgaagagaaataccaaaaagtggtattggttagtgcattcgatgaaaaaatggctgtgcaagcttacctcccgaaggctagggttctgacttttggggaaagtacagggttaacttttccctatggcacaatacttatcactgcaatctctgagcgtgttaacgatagaaggtggatcacggctttgagtcgcttcagcctgaatctctgttttgtgaactgcagcggtatgagttacgagcagcttgctatgaagtatcgtgggagggctctgggtaaattcttatgcaagggggccactaaggaagacctcctaggggagttaccgggtgaaccacaattcatcagttccttcgaatgtaaaatcgggagagatgagggcgttagggaggaaaaggttgctggtgatccatggttgaagaccatggttcaattgatgcagagccctgacgtgcaggaggaagagatagttgaggcagtggtctccgatgaatggttcaggactcacttgcctagagatgaactggagagtgtgagggcaagttgggtgcacaaaattctggcgaaggaaagcagggaagtaaggataggtgatatggtctctaaccaattcactgatgatcattctaaccaagtagggggccgtcaactaaccaatgctgcggagcgttttgagacgatatacccgaggcatagggccaatgatacagtcacgttcatcatggctgtcaagaaaaggctgagtttctcgaatccagctagggaacgagggaagttgtcccgcgcgttaccttttggcaaagctttgttaaacaaatttctgcagcacgttcccttacgacctgcacataaccataggatgatggaagaggccttgtgggaatttgaagagaagaagctgagtaagagtgcagcgaccattgagaatcatagtggacggtcatgtagggattggcctatagatatggccatgcttttctccaaaagtcagttgtgcacaaaatttgagaatcgatttagagtggcaaaggcagcacaaagcattgtgtgctttcagcatgccgtgctgtgtcgctttgctccgtacatgaggtacattgaaaagaaagtgcatgaagtcctcccctctaggttttacatacattcaggtaaggggcttgatgagcttaatgattgggtcatccgtggaaagttcgatggcctctgcacagagtctgattatgaggcctttgatgcctcccaagatgaatttataatggcctttgaactggaattgatgaaatttttgggtgtgccccacggagtcatagaggactacaaattcattaagaccagcttggggtcaaagttgggcaactttgcaatcatgagattctctggtgaagctagcactttcctcttcaacactttggccaacatgctattcacttttatgcgttacgacataaaggggaatgaatttatttgttttgctggggatgacatgtgtgcttcaaaggccttatctgtggtaaacacccacaagagcttccttgataagctgaagttaaaagccaaagttcaggttacgagcaaaccaactttttgtgggtggcatctgtgtccagatgggatttacaagaaaccccaactcgttctcgagaggatgtgcatcgctatggaattgaataatctggccaactgcattgataattactccatagaggtgggatttgcttacaaacttggtgaacgggcagtgaatagaatggatgaagaagaggtaagtgcattctataactgcgttcgcatcatagtacggaataaacatctcttaaaatcggaggtccgttctgtgttcgaagaatcaaaggagcttcttaccatgtgattggttagcttaggtcttagctgtagtattgatttgaatggatgttctggtgaagtatttgtgtaaatacaactttgtgcgtttgtctagtaagttagcgtctcctgtggtaattcactgtgttcctggtgcaggcaagagcactctgattcgggaattaatcagagcagatacccgattcgtgggttttacggccggggttgaggacgagcctgacgttagtggttgttggattcaaaagtggactggcgaaacacctgatggtaaatttgtaattcttgatgaatacacattgttatcggaagtgccagaggtgtttgcagttttcggagatccagttcagagtgtaaccacatctgtgcggcctgctcagttcatttgcactttcagccagaggtttggcagtgccaccagtgcgttacttaaagaacttggttgggaggtagaagctataggttcagacgttgtgcgggtactcgacatctactccgcggacttgcaaggcgttgtgctctactttgaagaggaggtcggttgcttgttaagggcgcacggtgttgatgcgaaaagttttgaacaggtccgcgggcagactttcaaagtagtaacttttgtcaccagcgagaacgctcccgtccgctctagggttgcagcattccagtgtttaacaagacaccgtgaagcactgtacattctatgcccagatgccacttactcctccgcctgactacacaaagacaatcttgagtgctgtagtgggttgcacgttcgcggtggtagtgtgggcgttaactcgggcaacaatcccgcaagtgggcgaccgcgatcactacttgcctcacggcggttggtacaaggacggtacaaaaacggtgcattattataggccagggaaactgaactccgttgagggttattctaaggggctatcgtttcaaccttgggcaattactgtcttactagtggccgtcatcatcgctctgagtagtctggatagaagccgctgtaggacgtgtggtcaagtgcattgatgctgcagtatatactagtgtgtgttttaagcttcatggtcctgctcttttgtttgcacttcagtagtagagagtgtctagttcttatcactggtgaatccgtgaggttacaaggttgtgtgatcacggaggagttcgcccaagcgatgtctaaggtgaaagctttaggttattagcgtgtaatcgaaataacaaacgatggtggacccacccaagagtcaaagtcagggcagtgacccccaaaatgctgctgctggggacgcaacaatgcagagggaacctcgcgtggagagcgcacgcgctaaaggcaaggagagtgcaagtaaacctagggccagtgggatggataagttcattgattccgaggcatgggatgatcccgctacggaacagatgctcgagcagcggcttgcaaatcttaaagagtatctgcggaagcgccggagtgctgtgattgtcactaacgctggattggagactgggagaccgaagttgcaggtcccagatgatatgcttccggatccaaccaatccttacaacagaccaacccttgaagctctatgtaagatcaagccaaagcccgtgtcaaataatatggcaacttcagaggacatgatgaggatattcaccgacctggagggtcttggggtgccatcagagcatgtgcaacaagtgctgatccaagcagttatctattgcaaggatgccagcagttctgtatacctagatccgcgtggcacttttgaatggcctcagggtgcaattgctgcagactctgtaattgctgtgctcaagaaagatgctgaaactcttcgtagagtgtgcaggctgtatgcacccgtgacttgggcttacatgcttgcacacaatgcaccaccttccgactgggctgccatgggctttcattacaacgacagatttgctgccttcgattgttttgattatgttgagaatccggctgcagtccaacctgccgaggggttagttcgaaggcccacgcctagagaaaagctcgctcatggcacacacaaggatatcgctctgcgagctgcaaatcgcaatcaggcttttgggaatttcagtgcggaaatcacaggagggaaggatgggccagagcttgtccgggattactctaaatcgagcaacaaatgatttggtggaaagttgccttgttgttgcatcttgctttcttaaataaatgtgggaagtcagacttccacttgtgtgttaatatagcttggcgtgtattacgacctattggtgggggcaagtcaacctatgcccggcgtcgtagggctgctagcattggtagatgttaccgatgttaccggctatcaccacctttgccacaaacaactaggtgtgatggtgtgacgtgtgttcctggcatttcctacaatatgaaggttgccagatatattagggatggagtaactgaggtgataccatccactccctgctacggggggagtagccgttaaatcctatttaatatataacgtgtgctactataaataaaaattggtttttaactatttttggcc

SEQ ID NO: 566 - DNA, 8192 bp, Actinidia seed borne latent virus
  source 1..8192: mol_type = other DNA
gaaaacaaaacgaattccgcgacatcaaattgtactcaactaggattacctgcaacagattgctaatggcttcaattgcagtacgaactccatatgagtctttttttgccgcaaacagtaaagatgaccagagacttcttcttaactccggtcttgaattcgttaaacgagagctagatgccgttggtgtgcactttgcgtatcaactttcctctcaaaagaaggaagcactcacgagcatgggtgtatcactgcaccctgttccctttttgtcacattcccaccctttttgcaagactgttgagaatcacatgcttctcaatgttctgccagacttgatgggtaacggcaagtggatcttttcttctatcaaaaaaaggaaaattgatacaatcaccaagaagcgtggtgtacaggcatctaatgtagattttgttaataaagttatatgtgctaaagatttcactaggtatgattttgatcccaaggtgcatgatgttagaaccaacatgtcatctagggaatttatctttccaaatagttatattagggcttgccataataataaaatttttatacatgatgaaattcaccattggtcagccgatgacatgatttacttcctcaacaattcaaatcccaagatgttgatatgctcagtggtttatccacctgaactcttaagagggattaagcagccacagaatccatcactatactcattcgaggttgacgagaaaaagcaaaaattgttcttctttcctgacaactgtaaaagtgaggcatatgaacagccactcagacttgattggctgttcgaagcagcctatatcgacaccggtgttaagaggtacactgtgaaactcatcaagagtgcttattcacatcacatgttccaaattacacctggtgagtatgttacggaaagcagaaggttttttaacgattttgacaccattgacttgtcaatcatgcatgagaatagatttaggtattatgattacatacctatcaaaaagacacatcttcaaaaagtttactcatacttattgtgtctcaagaagccggatgttgaatctgggttggcaaagttgaggcagatgtttgatgatgatcaagactgccgagtggttgaatttttttcaaaattttgtaaagacataatagaaaaacacaaaaataagtgggaattgtatgggtttagctggttggaaacggcgaaagattcattcatcaaaagcttacccattcagatagctagatgctttaaaaggtgggaattcaaaaatatatttgatttcctatttaatttacaaacgctatctgtgtcagtaaacactagggtcgtaacaagaacttttgtgagttcctttactgactacatatgtgaagaggttaaggagaatcagagtgtggacgcactgatgaactctaaatggcatggcattggacctgaaaaaactcaaaaatggaacatcagagtgatgaagatgcatgcttttgaagagttcagaaatgggtcagtcaagagaatcagtgtcctactatttctgggttttgaagcagaaagaatgagaaaggaactgaatttaaaaaaaaagaagaaaggagaggcacacactctgaaattacttaagtacacaagagacggtcccttcatcccacccaaatggctatttgagggtgaagatgaaaaagagaaaaaaaagaataaagacaaggaagatattgggatcgaagaaaaggaattcataaaagtaaatctcgtgacgtcaggctggtacgtcaaggttgatttgctgacaatgataagggaagaggaggaagtaggaaagaaggtggagaacaatgaaatttcaatcctcaagagcaaaaaggaggaagaaaaagaaaagagcattgttcactggccaactgatgcaaaatcaacggaaaaagagggaaagaagagggaagagattgaagtgggaagccctcatgaggaggttgaaaaaggaaaaaagaaaattgtgcaagagtgtccaaatgagattgcacccagatctgataacgaagatcttagagtcttcatcaccagagaggatctgaagaatgggtgtgagatcaccataatggaccatgatgctcatccaatgaaaaagaggcgaattgccaaagtggtaggagatggcaattgtttttacagagcattgagattatgccttggacatggtgagcatgagtacaatgttacaagagagaaactgcacaaaagtgcattgagttcaacctttttcagactcgaagatgatattttgcatgagttgatcactgatggtgtgtacacctctgatgagttggtgaaatttattgtcaacctagccaatatagagttaagaatatcgacacagaatcaactcaatcacttctcctcgtataaaccgctaattgccaaatatgaaaatgagccagtgtgcgtagtgcatatgcacctagagaatgagcactttgatgctgtgctttatgctcatgatgaagatggctatgatcaagaggaagaaggtggggtgattgaactcaaaagaggaaactttgaggatcttgaaaagcttaactttcaaaattacaagcccacaaagttaaaagggagaaaagctttcttctttgtcaacaatttggatatcgattatgggcacgataaagtgaggtacaaatcaaatctttatgatatagagagtatatgccccaaagatttgtacaatgggtacaatgcttgccttgtgcagatattcgaagaaggaggtaacattccaatgcatagagatgatgagatttgttatgatgatgaatctatattgtcaatcaatttgaaagggagtgcgactttctcatattcagatggaaatgttacaaaggacatcagaatgatggagtctagctacattgttatggatggtccgtttcaaaagaaattcaagcactctgtcaaaaattgcagcagtggaagaattaatgtaacattcagaaggcacataaggagaatgaacatggagccattggttgacattaacaaggagataaaggcaatgaaaaataggtgtatgattgatgcaatagcggataatgaggggagatcaattcctgttgtgatgaatgcattgcttaagaaagaccgcatcttctgggatgagtggaggaaaaatgataatggagggacaatatcagacttgatcaaggcagcgaatgaccttgccttctcatttgaagttgacaccatggacggtgtcaaaactttgaacaataaaggccccctgttcacctttgaactcaaagatggtcatttccgaaaatcaaagattgaaaagataggaaaagttatgactgagctggaaagaagggagatgaaaagggagacagagggttcttttggagacaaggttgtggagcttgtatcaaactccccaggatttaacaaattgacttttgaagtcgatgtggagtatgtgatgaaaatagttcattctttcaagaataggatgacaggaatagcactaagtgacatatactcaaatggggaatcaatctttggggaggttattgaagaaataagtaggatcaataaatcctcatgctcagacaaaaagaagaaagatgggtcttatgaaagtgagcacatgacaaggaaaatcgaattgaattgtgtcattgggcttggtggatctggtaaatccaactcactacagagctttctcaaaaaaaatgttaaagggaagtttcttgtgatctcacctagattaaatttggcaagtgattggatctcaaaagttggttgcaacccaaacaaggtcagaacattcgaaactgcactcaggacaaacctcaaatcaattgaggtgatcatagttgatgagctgaccctatttcctaatggatatcttgaccttttgatgtgcatgcttggaaaagaagtcaaaaggaagaagattgtgtgcatttttgacatttatcagtcaagataccattcagagtcagacacaaacatcctagggcaggttcatgatgttgatagaattgttaaaaataaggaaataagctatcttcatcaaagttatagatttatctcaaatttctttgactccttttttaaagatgtgacaataaataaaaaagttgaagaaaaatttgaggtaagagtctatgactgtcaccttaaagcacaaataattgaggaggaaaaagggagaaaaatagatgcaatacttgttgcatcaagagatgaaaagaatgctttaagtggcaaagtagaagtaatgacctttggggaaagtcaggggttgagcttcaatagagttgcaattgtcctctctgagaattctgaaaagcaagatgaatatagatggatggttgcacttaccagggctagaatatcaatatgcttcattgtgatatatagaggtggtttgtcagttttccttcaaaactgcggaaacaaattgattggggcattcattaaagggcaagaatgttcactaagaagattgaggatgatgagcgttgccaaagaaataacattcaaaaaagaaatgattggtggaaaatctgatgaggttgacagagaagaaagactggaaggtgatccatttcttaaacccttcatatttcttggaatgaggataaattcagaagagccagaaatgtgtgaggttgagatagtggaaccaaaaggaaaatctcacatctgtatagcccaggaaaattttgctttatcaaggaattttgaccttattagatcaaaagaattgagggagtacagatttagggaatcgaccaccaatcaattctgtgataattatgaaagagttggcacaggtgcatcaaaacacactgccggaccacttcgatttgaaagcatttatccaagacaccaaagtaatgatgatttgactttctggatggcagtgcataagaggctcaaattttcaaatgaagcaaaagaaagggcaaagcttaaagagtcaagcatggtggggcagctgttgtattacaaccttaaagagaagctaaatcttagtttttctcatgaccctgggctgttatcacaatgcataaatgattttgaagttaagaagctctcgaaaagcaaagcaaccatagccaatcatagcataagatctgacatggactggccaatgaatcaaatctttctatttatgaagagccagttatgcacaaaatatgagaagcaatattgcgatgcgaaggcgggccagacccttgcatgcttccagcatatggtgctagttaaatttgctccatattgcagatacatggaggcaatgattagatccaggttacctgatgagatttatatacactcaaacaaaaatttcaatgaattgaatgattgggtagttaagcacttcaaaggtgaaacctgtgttgaatcagactatgaagcatttgatgccagccaagatgaatacatagtctcctttgaaattgcaatgatggaggatatgggaatgccaaattggtttatcaatgattatattgacctcaaatgcacactggggtgcaagttagggcattttgcaataatgagattcacgggtgaattttgcacctttttgttcaacacacttgcgaatatggcgtttaccttttgtagatatgattggaggaaagggcaaccaattgcatttgcaggtgacgatatgtgctccttgagcaatctagaggtgtcaaacaagtttgactcgatatttgaaaaattaagtttgcaggccaaagtgattagaactgaaactccaatgttttgtggctggagacttagcaagtatggaattgttaaagagccagaacttgtattcaacagattcatgatagccaaagagaggggcaatgttgatgaatgcctagaaaactatgcaattgaagttagctatgcctacagtttaggtgagaggctatttgaagttctgaaaagtgaagaacaaattgagtatcaccagtgtgttgtgaggtttataatacaaaggcttgaaaagatcaaaaccaaggttaaagatcttttttcggatcagagagatgtctaaaagcattaaagtcaattcaatagtaaatagggtcaatgtagataagtctatattagggtctagcgaaataagctcgctgtatggcagcaagtacgctccattagttttcaaagatgaggtgaagatgatagtgcctgggaacattcttggggggccaattaaattacaagcaaacattctgacaaaagagcgccttggcataataaggggtcaaaagtttgggggatcaaattgcgcatatttgcatctcgggtttgttccaattgtgatccaatctctattagtctcggggaatgaattggtgaaagggagatgttcattggtcgacctttcaagaggatctgagaagacaggtttaattgacagattcaatttcaagttcacaaagaatgagccgttcgcagcaaagattctaacaataaacgcacctattgacattaactgtgacacgtcaatcaacagcatccagattcttttggagcttgaaggaattgacataaggacagaaaggtcagtgatagcagtggtgactggattaagctgtgtaccaacgaatagcactataatgttacctggcttgaagagagagacaccgaaatggtcgatatgcaatgttttcaatgttccagaggaatctgaagaagacaatgaaaggttcaactcgctcttcaatggtgctaatccaaagttgatagatcttggaaaagacacggttctggataatggtaagaaatttggcttctgggggccatcagttaagcctgttcatcgtagagaattgacgactaagaacatcattaaagaacagatgtctcaagttatgtccgagacggtttcaaatttgaacatatgtgaggagagaaagaagctaaggaattgtcttgagaggtcaaaatccgtgcgtggaaatgtcagcgaagttggcaaagaagaggttcctgttcgacgaagtctcagagtggatatggaggaactacatcgatcaggaagacaggatgctcgcatggaaggtggacagcaatgggaatgtgaggcatctaaatacaaacacgatggaacagaagtcaaggattatgacggatcggctgaaagcgatattcgggaatattgcagattactcggcgggtcccgcaacaaactttccatcgattatagtggacttcaatgtgatgaatgtgaatgggatagaaaatctgacatcaatagatgggagtttcaatctgaggacaacagtggaaacaatgaagacctacatagcaacccatcaggatcagaggatatcatcatcaacgctaagggaggtctgcaggagttttgcgaacttcgcccttaattactaccttgatgatgaagacaggcagagtaaccttgctgacaaaatgccacaacttgcactgatggcgagggaagttatgtttgatttctcagatggaatttcaccaagtatgcttagatctcacccaaataggacaaaagtgattcaagagttgaatagtagacttttgcaatctactggaactaaggcagtgtttgaggctaggggaactgtggagtcagcagttaatctaatagtgtagaatggaaaaagctgagtcttttgccggtaagactataaagaactgggtagctttaaataaggcaaacatctttctgagtctaataaactcatttggcagggacattgggttcaaaatcttcatgatgtataaatgcaaatgtgaaaaagagtacaaggaccaaattaggtaccaaaacatggtcaattatgggcaaggcaaatccaaatctgctatgaaaagaagagcaattaaagttgagcattgttacaaatgtggaaaatttgaacatgatggtcactgtaataaaaatcagacaaattctaatcatgaatatttggaaatgtttagatgtgggccgattaagcttaaagctgaaagggcacttaggaaaaatagtatggtccaaatgtcatgtgaaaaatttggatggatgatcaaaatgagcaaagaactcaaggagaaagccaactctggaactgcagaaagagtataaagagtctgcatatgcgtgagtagttataacttaagtaacttgctttggacgtttaaaaatttgacc

SEQ ID NO: 567 - DNA, 6620 bp, Fig latent virus 1
  source 1..6620: mol_type = other DNA
tgcgacttgcgcgtaccatttcaacagaaacgtacccatgatacgcaagctattaggtgtcgcgttgaaatccaggcttggcatcaggctgtaccgagctcgatccatagtacgcgcagtgtgctggaatttcgccttggcacgcggtcgacaagaccatatgctagaccaggcctctgattctttagtagtatctatacttacttcacataaagatgtttctgattattttttttttagagatatccctagacgcgtctgggtagttagggatttgtgcgcccggattcagaagggcatggatggttgggcgagcatccctttgaaaaagacaatacaagattggctatgtgaccactcgctcgggctttgtgagcgcctcaacctggtggatgattttgagcggaaactcatgcggcttaaagatatcgagctggacctggatctagaaccatttatccgaaagcccgaatctgtgcttgaatctttcgattctctctggggcctggatgctccttcttcaaccttggaccgacccgctgagccatacaccggttactttataagtctaagatacagggtagatttgagagggttcttggagagagtggagcgctacatgcacagacgctctaacccaaccttcgccggtcacttgggtccaattctgccaatctgttacccgatgccggacaaagtcatggctgaagccgtgaccgtcagtagtactgagccaaccgagcccgaattggatacgagccaaccacccagagacaggataccttacccctcactgatgaggagactgcaccgaccagcttttatcttgcaaccggactaccccccccatcggtcaggatcatggagagtggctccatcttccaagagatgtttcagctacgggcatgctcccagtattaccgaatccagggtggcagatgcgctggaagagatttttatgagacctatggctcaatcaatgctgtaccaagtctatgatcaggatgcgtccataggtttccatgccgatgacgaggagtgctacgacctctctgataaccctgtcctcacgataaatacaaaggggttcgcgaagttcatgtgcagagatgatagaggtgaggtgtcattcgatctggtgcctgggagttgtttactgatgccaaacgattaccagacaagagggaagcactcagtcaggagctgctcggctggtaggacctcaacgacattcaggatccagaggcgtgatgtgcccaaaggcaaagtcagtaagggtctcactaacgaccaaccggccccgaaagagcagctgacacagcaggatttcgagaatctgtctctcgatgatcaggtttcactctgtatgccatacagctgcttcttcaagtgtttagcctcggaaaaagacgatgtgtcggccatcctgttacaatgctcagaatacctctggtctgtataccagaacaggggcacctcagtcgccactgctctcaggatttgcaaggacatgggttactcagtgcagatattggagggcctcaagatcaccaaatcagacagtgaggggctactcaaaatcaagttggagaacggacattatgaacttgtgaaagacttctccgcctttgatagcctcacccagaacaagaagaagaagagggagtccagtggtgccaagctcgatttaggttctctcaaagtctcagatggcttctactctcagatctcattcaaagcactcaaagtcgccgctgagaaacttgtggttagcctactggatggtacatcaggcatcatctcccagggtgtgcggggcgagggcttcagaatagtcccgggggccaaatcagagcagactgcacttgacataattaggagagctgaggacacgacaaaagatatcgtcacaatcctcggtttcgcaggatcaggcaagagccacggcctacaacagagaataaatgctgagggtaagccccaaggaatcctactgctgagcccccgcaggcaactaatggaagattgggtgaagaaatgccccaaactgagctgcaaaacatttgaggctggtctcaaggatgatctccgggcatacggttgcgtagtgctagatgagctgtcactcttcccaaatggttacctcgacttgctgatcatcaaggcgaatttactgggtcatcaaaagcttcagatagttgttgttggggatccaattcaagcaaggtactacagcaaggatgaccagcacaggctctacaaggagcacgaaatcgataggcttggggaagtcaattatggcctatggacacacaggttaccatcccgactggcagataaactttccgtggaaacaaccagtgaatgtcctggaaccgaggtagtggtccataactcactacctgaggcccgagctgcagccagaaagaagaaccaggaaatagaggtaatcttgtgtgcctcccgagaggaaaagaagagctttgaagacaacactctgacgtttggggaatcgcaaggcctcacctttgatttcggcctcatttcactgtcagaggaggcccgcttaagcagtgaccagcaaatcctggtggccgtcaccagattcagaaagggctttggtttcatctacaatgccaaaggagactacaaaatttttgccagaaactgtaagggcctcctcttgagaatcctcggtaaaccaaaggtgtcaattgattatctcatgaacatgacaaaatccaagctcaaaataaataaacttggtggtgtcggggcgggcctggatgaacgggatagggaactgaggttggcaggggatccctggttgaaagggcaaatcttccttgggcagagggtaaacatggtgtctgaaacagaggctctagttgaggagcaattatccacccacaagatccacctgcccataagcactgagaaactcataacactcaacatgggcttttccaaatccaaatactgcagggagatcaaaacaaggtctggtgcctcaaatcaaattctggaggaggatagggggcggggttccactgatttaccgcaaccttgcctggttgagtcgagatatctgaaccatagctcaaaggatgatgtcaccttctgggctgctgttgttaaaaggttgaggtttgcaaagccggaaaaaaactacagaaaatacctacttgcgaaacaccggggtgatgcaatgctgagggccttcctagaattggttccactaaaaccaatccaatcaaacctccttctaagtgaggctgaagctgactttgaagaaaaaaaactacaaaagagtgctgcaatggatagcctgccattcaatagatctgacccagatgcggcggcggatctcgtcaaggtcctttttgaaaaaccagcctttgcacaaatttggaaaaggttcgtcttagcgaaggcggggcagaccatagcatgctttcaccatcggatactccttcgctttgccccaatgtgcagatacatagaaaaggtctttagtctccaatgccccagcaacatctacgtgcatcagaaaaagaatttcgatgtgcttgaggcttttgtgcgtgatcacttctctggcgacttgtgcgttgaatcagactatgaggcctttgacacatcacaggatgcatcaactctggccttcgaggtggctctgatggagcaccttaagatccctagtcattacattgatgactatatagtcatgaagactacactgggctgtaagatgggatctctcgctatcatgaggtttacgggcgagttctgcactttcctcttcaatacattcgccaacatatcattcacctccatgcgttatgtgatcccaaggggtacacccctacttttcgctggtgatgatatgtgtgccctgcggaacctcaagctccgaagtgaatacaatgacactcttgataagctcaccctcagggccaaggtctgcaggacgtctaaaccactcttctgtggttggaggttaactaagtgggggttatacaaggagccaatcctggtgcttgaacgcctcttgatatcaattgaaaggggtacattgaccgacacgataaattcgtacttcctcgagttcaagtatgcctatgataagggtggaaacctggaggatataatggatgaaggtcagcttgatgcacatcacaggtgcgttagaatatttcttcgacatcaaaacctgctgcatgacctcaactacagtaccctccatgaggggctggattgatgccccattaggttcgagctcgcgagtgaacaagatgtcaatatacaaaaagagctcgaaactaggtggcgactggctcgtgctgagatctgagataaatgccgcccttgatttggagttgaaagatgggttgctgtattccaccatccctttcgccccccgttcccttctgactgataactgcaaatacgggtacatacactggggtcagattttagttgaggtggttgcactgcatcaggccaaagaccatgactgcctcctcgtgttgcatgatgatagatgggaggatccaccagatagactgatcaagtgccaacgcttcaagctaaagcagggtccaaactccttctccttccgtccagatttcctggtatccctccttgatacaaacgccatggaatccctcaggttaagcatatttgtcttgggcttgcgcatgaaacctggatccaagcccattgcagtgaagacgacagggatatacaaggcaataacaaacctgactgaggatctctcttatcggcaatcaaatatagagatcagggactccgacgaagatgctgtgaacttgcttgagcacttccctctgcactccttcgagatagaggaaagtacattcaggagatggggtctgacaggtccaaagagggtacacaatgcaaatatcaagagagtggttcaaaaagggagagggattaggttccgagaggcagacctgaaaagtggtagtacgtttgacgataatagttcatattcgctgggtattgagagtcaaccatcttcaccacacaatgtcaacggtgcacgaagtcctgaggagtcaagtgaagaaagaaatattagagagattgatgaaagaagacgccttcaagggagtaaaagaagaggacaggtcaagagtctggagaaacatatttgggaatatagccatacttggatcctcagaggagacagagttcccacccctagagttggaggtggaggatctcaaaggtcagaagatcgcgtcttacactctctcagatatcattgagctgataagggattaccgtgacacccacaagagccagtcgatcaagatgatgacactcagaaatatatgtgaggcatttgcccacgaggctcgactcttccttatggaggccaagaagattggacttgtcacaaacctctgcgctaaaatgacaaagacgtgtgggcgcgctccccaggtggctttcgatttctcaactgggctggctcataatacactgtctaattctgagaagtcagtcatccagaatctcaatgcccgtctgtatgcaacacaagccgaccagtcaaaaaacgaggcaataatagataaggggccagcagcaggtcctgaccatctaaatgtgaatctgaaaataactgatctatcagacctggtagtgtttaaattggtgtttgtattactaaataagactgtagatggtgtgaaaggtgtgtttaataatttctgcagcaactttagctcggtcagtgcaccaactcagacacccccaaaagagatagaggcggatagcaaacttgagaaactcattgagcactcactggagagggcggctaagcttgacctaggctcattatcaaaaatcaagcctttcccactcccgagagactgcgaggatatccttggcgactgcggacttgctagggggcgaagtgggttgattcagtattataagggtaaatcttttgtggaggccccaagaggttattcaaccagactcattttccccgccctggtcaactatagaatgagcaattcctccgaactcttaggtgtgctgctagctctgaatagatatgagggtgatgggaggattgagaaagtaactgacatagagctgtccgccgtaataaacagatacctggatccctacaggagtaagagtgtaactgtcagggactttgatatactcgccaatgccgctcccgggtgggttgacaaagagagtattgttgggaatcctacatacgcttggtttcctagggcaagataatttgagaaacatattttccaggttggaggtgggtgtttatgaggggaaatcatcctatgcgagaaaaagacgagctaagttgctaggtgtgtgtcataagtgttttaaagttaataactgttgtgtgagatgtagtgaaacagccaagctcaaaagggagtggaagaaagattgggtactcaatggtttgcgtaagggaactgatgcgatccctgaaccaaggcttattcacctccttgagggattgggtataaatacaaataattagatgtttaaagttaaataaatggtcttggcaacctaaaaccagacgtgacctggaggcaacc

SEQ ID NO: 568 - DNA, 7187 bp, Arracacha latent virus V
  source 1..7187: mol_type = other DNA
ctctctagcataggggttcatacttcagtgaactcttttcgttgccactctcatccaatatctaagatgttggaaaatcatattttagtgaatgtgttttcccactatttaaaaaagaagaacctgtttgtttcttgtaggaactctaaaataaatgctgtgctcaagaacagcaaggccaatgttagttatgaacattataatagatttgtgcatgctaaggacccgctccgctacacggagtttattaaggaattagattatagttttatgccagcattagttagaaaaggaaacggtgcagaggtgtgcttcatccatgatgaggtacattactggtccatagaaaatttccaggatttcttagggcatttagaatgtgagcaagttatttattctatagtttatcccgtagaaatccaaatgggagtaccgttctccctaaacccgcacttgtatgaattcgaggatgaaggtgagggtacattcaggtggttcccagatggcaaggcgtcaggctcatacgttcaacccataaatccttggctgttgaccacatcaaaaacggaagattcaagactgaggggttggagtatcacgaaactggagagtttcggggctcatcatgtcttcttggctaccagggggatttgcaccaatgacaaaagggattgttataatgactttgcttgtatcaatcccttgagtttctgtagcaaagtgagcaggggcatgaggagaatccgaagctctttagctaaggaggtgtttacctacctattggcgctacgcaaaccggagcctcaatcagcggtggcaaaaatccggcaaatgagcaaaggaaacataatggaggatgaggtgatgtttcttgggttggtcgcaagaaagctgcagggaatgaacgtattttctgaaaaaaagaacacgagcatcaacgagttctcggtgatagagctgttcacagatgtactcatttcttgccttggtgaaaaagcgagcctcttcttgttccacaaaaagaagatagcatcggacctacagggtctacttggtttcttatcccctgctgagttcaagattcagaaagtattcagagagagaaagacaaaaagcatcaagtacagaataagtaatgctgttctatctgagagcgtaatggatgaagagcttggcggggacatacaactgaacgaaattagatgcggcggaagggactctgcttcttattcggctaccaaagaggagctgctcttgccaaggattgacatcgggttggtggagttcatgacctacgtcaaaaggctgcgggactttttcctcaatccacccgcggcatacgaaagctcgactatgttctatgctgatatggtggagccgatgaagagatgctatgtgtggatcagcaaggactggggtctagtgaagcaggtgagactgatagccggtattaatgatgaggatagcttaagaggcgggttaataactgccgatgagtacctcaggaggaaagagcctaaggtggcgacaaaggaggaatcacctgagataaggagcctgaaactggagaagccgcagctgggaggcgtttcttgtgaatgcaaaatgagcttcgagaccggaaattaccgaggaaaggggctggacctagtggatggtgacaaactgaagaaccgggaggcatggttttactctagggggggtgaatcatatacctatacaggagccacgcacaagagtaggggctggcccaaagagctgaatgaaataatcggttcattaggttttaaagctgaatccttcaaccactgtctcatccaaagatacaaaggtggcgctgaacttaaaatgcacaaggataacgaaccatgttatccatcgaaaaacagcatcctcacatggaatcagcatggtagttgcacctttagtgtccaatgcaataagggtagcgtgcagctgggattggaagaaggtgaccacatcatgatgccacagggttgccaagagagtcacaggcatggagtgaatggatgctctgaaggtaggatctcgtacactttcaggagcacagaggagcatgatgttaatggaccactccgtgtacttgatgaggacagtgatggtagtataagctcctacgaggaatgtgatgaagaggaagatactgccatagggggcttggagaaggggcggaaagtgtgtgccctgaatgctttgagtgcgcacctgggtctcaaccacgaaacaataatagccaaggtcctaggggaggacaaaagggcagcgctggccctcaaaagtggtggtatatccttgtcaactctcctgcgctgttgcaaagcattaaacctatccggatgcgtacatagcgagttcggcggttttaggatgaatggcgtgatcaaggaaatcaatatgtacatagagaatgatcacgtggagttgagcgacagggtgtgcacatccagaggcctgaggagtgcaatgctactgaaccctgaaacgagcccggtgacctttagcgccaagaaagaatacgctaagaatctggtcaatgcatttacagcttatgagacaggggtgatcatcaaggagcggttaagcaatgtgcatttggagtccaagattcatgagctgatgatgagctgcgggttcgcaggtagtggtaagagtcactatgtgcagactgtgttgtccttcgagagtgccccacaaacgctaattataagcccgagaaaggccttgaagctcgattggcagaagaaggtgcacaaaaagcacgtttgtgagacctatgagaaggcactgctctccctgcacaggtttaagaatgtggtagttgacgaaattgatctattcccagagggctatctggatttcttgttgtgtgcaagtgattgggagtgcgttgtgattcttggggaccctttacaggcccagtattacaaccaggatgacaggctcaagttgggtggaatcccggatatgttctcgaggatcaaagggaagatcaactatctcatgtactcttatcgtctaccagcgaaccaagaactatttgaaatcaattgctatggggacggaaacgcaaagagtaagaagagtgatgcgcaggtcttggtatgtgctagggagggcctagttggacgggagaaagcctatacagtcggcgagagtcaaggtttgagcttccaggacgttaaactggtagaggataaaggcttgaggcacatcaaaaacggcacaatgatggtggccatgacccgctctcgtaacagcttcatggtggatgctaagaagacgcaaggttgctctttcctgaacgcagtacaaagtgggaggcgtataaccaatgccgagctcaaattagaactaagccagcgattgagtgaatttagttgcattctatctccctatctcgtgagcaatatggagagcattgaggagaagttggccaatgatccgtacctgctaagcctcggaaatttgtgtttcgatgatgagccagatgaggaggagattgcagacgaatggtgtgccgaggaggccatgaggacccatttattcataagcgaagagagcaacacgctatactcgagcacgcttaagagtaaggaggatagagagcacgtgtctgagcatactggagcttctgaccaaatagatgagataggatcaacgagagagcacacaatggtgggccccttaagctacagaagtcgatacctggatcacaagcacgcagatgataccactttctttatgtccgtcaagaagaggctaaggtttgcagattatgagaggaacaagaaaagctacgaaagaaagatctgctatggtgagcagatgtttcagaaaatgaaggagttccttagtctgcccgatagcccttgggtgagtcctctggaggcaagtgagcaagagtttatagaaaagcgtgcaaagaaagcaagcaaattgattgcagctcatcaagacagaagcgacccggactggccatcaaattacgtgaagatattcctgaagcagcagttgtgcaccaaaatggagaagaggggggctgatgccaaggcgggccaattaatagcctgtttttctcattctgtgctttatcggttcggagccataattaggcagagcgagaagactatgagccatctattgcctgctaattggctaatattcacacaaaaacggtatgaggatctggatgaatggtgtaaggagcacatgaatgagcaggtaggaacagactcagattatgaggcctttgatcagagccaggacgggaccatactagcttttgaagtggcgcttcttaggtatttgcattggccggaagaattggtggaagagtacaaagaactcaaaatgatgatagggtgtaaacttggaagtttacaggtgatgcgtttctctggggagttcggaacgttcttcctgaacacttgctgtaacatagcgtacaccatcatgcgttatgagatcacacccgagacacccatagcatttgcgggagatgacatgttctcaccaagggtactcactgttagccacgcctacgatcacttcatagagaacaagagcatcataaagctggtggccaaggttagaatatccagtgatccattattctgcggttggagaatgacggtctatggcatcattaaggacccaaatctcttgctggatagatggaaagctgcgatagaaaaagggaacctcaaagaatgtatggataattatgctcttgaggcctccttcgggtaccgagtcggtgacaatttgtatgatctggacattgacctggacgcacaaagtgaattgacaaggagaatcataaagcacaagcaccagctaagcaggggggttgccgagatcttttccggaggtggggatgttgcatcagatgaggaggatgagtggaagtacctctttggtgcttaaaaactcgagacaaggtccaaaaccttgatccggttagrtttagatctgtatataaataaagttgaccaaggtggctgattcaggagtggtgttgcttaaaaccttcttgaggtaccatcgatattcaacaaacgagtttttattgcttgctagtatcaaaggggagaacctggtggattgccatattaggaaacggagtgaattgagtgtggaggagctaaagaaaattgcatatgctcattacaactcaaaggttatagattccacggtgaccaaaatccaaggaaataacctaaatttcacagaggcggaattagaaaccatcatctttgtcgggccaaggataacggagcttgcatccaagacgtacgtggataactcgagatacgtgaattactatggattctaccgagctccggatgttgaagtcaacccagtcgagcagtatgcccaacgagcatttgagcgcgccattagtgaaagaaactcgcgtgtttgatgggaacaggagccgaaagatggagtcattcaaggacatgggcaaagtggttgaacgcgggaaagtgtacgatattggggccatggaaaagatgttcccagctcgtgtacaaaaggccgcgatggttaaggagctgtgtgtcaagaacaagggtgtgcattgcacactggagttggctgatgacaaaatgaaggacacaatggatcctgaaaagtatccattggttcacatcggttgtctcgtggtcggcgtgatgccccttggaaatgatttaccaggagaaggtgtggtgactctaacagatggcagaagaggtggggccggtggtttggaattaatgtgctttagtttcaagatgaatgatggcttgtctgcattcagttgctttccgaacttttgcgtgagttcagaggacatcgtaaatggattctctctcataatgaacgtgaggttaagtggtctggatttcaaagataaagtgcatccaatagcgatagacatgatgagcgtggtgtgtcaactggataacagcatggagacaaaatgtcttcttaggggcaataacaaggccatgtaccaaccgctcatcaattcaaaatttcttgatactacaaagcttgagcttgaaatgcagaaaccaaatctgagcaagaatgatggtaacgctgaagaacaagaggaggaccaggttatgttaaaggtcagagcagcaataaataagattcgagtggatggagagggcacaaagaaggaccgcagtgatcacgctcctcggggcatatactgaggtcaaagacaaattagaaaaaccagataccctaacggaggtcctagaaggggtatttggtcatatagcaataatagggaccagtaataaagcagtgtatcctagcgtagttattttacacaataaagattgcactagaacggacttctcaaaaggggtcaaatttcctctcaggtctttcgtgttggcacttaaggggcttggaaagagcgctgacaacgagccaatcgccgggagcactctgaggcagttctgtgacccttttgcagaagaggcaaggtcctatttacttcgagcagcaacttggggttcttattcgcaattagccttgaaattggctaagttgggtcaaaaggagccacaagtgtgctttgacttctctaagggattggatctgctacacataagcgttagcgaggctcaagtgattcagagtctgcactcgaggctttttcgcactgaaggtgccaaaggagtctttgctgcgcaatcttctgttggcgaacaggctgtcgaaatataggtggtttggacatcgctatggaggctccgttcttgggtaaaagtaaaagtagtgctaaacgtagggcccgcaggcatgatagatgtctgaagtgtggggctttttcacatataaataaatgcaaaataatgcctagtgtttctcagtcaggatgccaatcttatcttattagtgggccgactaggtttgtgaccgaaagaccacattggactaacgcagattggttatgcttgagagactcagaaaaggctggtgtgacttattatagggagtggttgcttaacaaacactccggtaatggtacaaaaattaaaagtccggaggaaaccccggaatactacaatggctgacgaaagatctaatggtaggccaggataaataaaatttgaggattatagacctcaaaaaaaaaaaaaaaaaaaaaaaaaaaa

SEQ ID NO: 569 - DNA, 8222 bp, Actinidia seed-borne latent like virus
  source 1..8222: mol_type = other DNA
gaagcatcacaatttatgtgaaaacaaaacgaattccgcaacattaaattgcactcaactaggattacctgcaacagattgctcatggcttcaattgcagtacgcactccttatgagtctttttttgctgcaaacagtaaagatgaccagagacttttgctcaactcaggtcttgaattcgttaaaagagacttggacacaatgggtgtgcattttgcatatcaactttcctcacagaagaaggaagcattgacaggcatgggtgtatcattacatccagtacctttcttatcccactcccatcctttctgtaaaaccgttgagaaccacatacttctcaacatcttacctgatttgatgggaaatggtaaatggatcttctcttctattaaaaaaaggaagattgacactatagtcaagaaacgtggtgtccaagcatccaatgtagattttgttaataaagtaatatgtgcaaaggattttactagatatgatttcgatcccaagatacatgacgttagaacgaacatgtcatctagggattttattttccctaatagttatattaaggcttgccataataataagatatttatacatgatgaaatccaccactggtcagtggatgacatgatcttcttcctcaacagttcaaatcccaaaatgcttatatgctcagtggtgtatccacctgagctattgagagggattaaacagccgcagaatccaactctatactcgtttgaagtcgacgagaaaaaaaaaaaactctttttctttcctgacaattgcaaaagtgaggcatatgagcaacctctcagacttgattggttgtttgaggctgcttacattgacactggtgttaaaaggtacacggtcaaactgattaaaagtgcatatgcacatcatgtgttccaaataacgcccggtgaatatgtcactgagagtaagaggttttttaatgactttgacacggtggatctgtcaatcatacatgagaacagattcaagtattatgattacataccaattaaaaggtcacatctgcagaaggtgtactcatatttactgtgtctcaaaaaacctgatgttgagtctggattggctaagcttagacaaatgtttgatgaggaacaggattgtagagtagttgaatttttttcaaaattttgtaaagatataattgaaaaacacaaaaataaacttgagatctatggatttggctggttagaggctgttaaagattcattcatcaagaacctgccaatcaacatggcaagatgctttagaagatgggaattcaagaatatatttgatttcctttttaatcttaaaaccctttcaatatctgttgaaaccagagtagtgacaagaactttcacaagctccttcattgattatatatgtgaggaggtcaaaggggatcagagtgttgatgccataatgaataccaaatggcatggaacagaacctgagaagattcagaagtggagcacaagggttatgaaaatgcagtgctatgaatcttacaggaatggagcagtaaagaggattagtgttctgctcttccttaattttgaggcgcagaggtttaaaagggaattggcctcaaaattggacgggagaacaccccaaattaaattgctcaaatacactagagaaggtccctttctcccgccaaagtggctctttgaagaagagtgcagcaaaaagaagagagaaggggagaagaagaaatctttgaaagataatcctgaagagattgtcaaagtgaatctggtcacatctggatggtatgtgaaggttgacttgtcaacctttttgaggggccatgaagaagggaagaaggaagagaaacatcacccagaagaagagggaggaaaagggaaaacctcaaaagaaaatctaaaggacgggggtgaatatagaaagagagaagaggaaaaagacaaaccccaaagaaaaaaaggtgatgtaaagagtgaagagggacaaaaggggagcatatctggctataatgaaggatccttaagaggtgaagatgagagaatcttgataactagagaattgcttatggatagttgtgaaatcacaatctctagtgaatctgtcatctctgaaaagggatgtaagagaatcattaaagttgttggtgatggtaattgcttctatagagcattaagagtttgtcttggacacgatgaggaaggctatagcatcacaaaggagaagttgcacaaaagtgcatctaaatctgaattcttcagactggacaatgaactcattgatgagcttatcacagagggagtttacacctctgacgagctcgtcaaatttatagtgaaccttgccaacatagaattaagagtctcaactggaggctacctggattctttttcatcttacaaacctaaattggccaaatatgacaatggaccggtgtcaattgtgcacatgcatttggagaatgagcattttgatgcagttgtttatagccctatgcaagaggatgattcaacccttgcagatgaaggggacattattttaaaggagggctcttttgaagcgctctcacttctcaaattcgagggtttcaaagtaactcaacttgcatcaagaaaggcttttttccttgtaagcaatttggacatagactatggacataataagattcggtacaaatcaaatctgtacgacattgaacagttatgcccaaaggaactatacaagggttacaatgcatgcctcatacaaatatttgaagaaggaggcagcatcggcatgcacaaagatgatgaggtatgttatgacaatggatccatattgtcaattaatcttaggggaagtgccattttttcatattcagatgggaaaagagaagttgatatccctatgcatgaaatgagctatttagtgatggatagtgcatttcaaagaaagaatagacattccgtaaaagggtgtagcaaagggagaatcaatgtaacattcagaagacacacaagaaggatgaatatggaacccctgattgacatatgtgaagaagtcaaggcaatgaaaaaccggtgcatgattgatgcaattgcagagaatgaaggacggtccaacataatggtgatgaatgcactactcaagaaagatagacctttttgggatgaatggagaggcaatgacaatggaggcactatttctgatctgataaaagctgcaactgacctaaacttctcatttgagattgatactgctgatggaataaggacgtttaataacaaaggtcccatgtttatgtttgaactcagaaataatcattttaagagttcaaaattagacaaaataggaaaggttatgacagaacttgaaaaaagaaagcaagaatcagcagttgaaagttcatttggtgaagatgtgattaggttaatatcaaactctccaggattcaataaatatgagtttgaaatagatattgagtatgtgatgaaaataattcactcattcagaaacagaatgacaggagttgctttgagtgacatgtattcgaatggagaatctatttttgaggaagtcattaaaaagataaacaaatgcgtgaatgcaactcgagaaaggaagaacaagggagaggcacaagaaagattcaaccaagtggttgaaatcaattgtgtgattggattgggtggatcaggcaaatccaattcaattcaaaggtttctcaaggtgcgtaggaggggaaaatttatagttatctcgccaaggctgaatcttgcaaatgattggattgaaaaaacaggatgctgccctgagaaggttaggacttttgagacagcattaagagtcaaccttaagaaggtggaggtcataataatagatgagttgactctatttccaaatgggtaccttgacctgttaatatgcatgctaggggatgaaatcaagaagaaaaagatagtctgcatatttgacatataccaagcaagatatcactctgactccgatgtgaacttaattggacaggtgcatgaagttgacagaatgattaaaggaaaagaagtgaattatctacatcagagctacagatttatctcaaatttctttgacactttcttcaaaggtatagcaataaataaaagggttaaagaagattttgaggtgagggtatatgactgtcatcttaaggcacaaatcatagaagctgaaaaaggcagagagataaatgcaatattggttgcatcaagagatgagaagaaggttcttagcggaaaggtagatgtgatgacctttggagaaagccagggactgagttttgacagggttgcaattgttttatctgaaaattctgaaaaacaggatgagtatagatggatggttgcattaaccagagcaagaatctcagtttgcttcataatcatatatagaggtggattatcagtctttctgcaaaattgtgagaacaaactgataggtgcttttattaagggtcaagaatgttcattaaggagactcaggatgatgagtgtagcaaaagaaatctcattcaataaagaaatgataggtggcaaatctgatgaagttgacagagaagaaaggttggaaggtgacccctttctcaaaccattcatattcctggggatgagaataaattcagaagagccagaaatgtgcgaagttgaagtggttgaacctaaaggaaaatctcatatatgtatagcgcaagagaattttgctttgtcaagaaattttgatctaatcagatcgaaagaactgagagaatacagatttaaagattcaacgacaaatcaattctgtgatagctatgagagggttggcacaggggcttcgaaacacactgcaggtccattaaggtttgaaagtatatatccaaggcatcaaagtaatgatgacctcaccttttggatggcagtgcataagagactcaaattctccaatgaagcaaaggaaagggccaaactcaaagaatcaagcatgatcgggcaactactttactacaatttgaaagagaagcttgatctcaatttctcacatgatccagggttgctgtcacaatgcataaatgatttcgaagttaaaaaactctcaaagagcaaagcgacgataaccaatcacagcattaggtctgacaaagactggccattgaaccaaatatttctattcatgaaaagtcagttgtgtaccaaatatgaaaaacaatactgtgatgctaaagcagggcaaacgttagcatgtttccagcacatggttcttgttaaatttgcaccatattgcaggtacatggaggctatgataaggtcaagattgccagatgagatttatatacattcaaacaagaacttcaacgagctcaatgattgggttgtcaaacatttcaagaatgagatatgtgttgaatcagattatgaagcatttgatgcaagccaagatgaatatatagtatcatttgagatagccatgatggaagacatgggaatgccaacatggttcataaatgattatatagatctcaaatgcaccctaggatgcaaacttggacatttcgccataatgagattcactggtgaattttgtacattcttgttcaacacactagccaacatggctttcactttttgcagatatgattggaagaaggggcagcctatagcatttgcaggcgatgatatgtgctcactcagcaacttggaggtgtctgacaaatttgattcagtgtttgaaaaattgagccttcaagcaaaagtaataagaacagacacgccaatgttctgtggatggagattgagtaaatatggcatagtcaaagaacctgagttagttttcaataggtttatgatagcaaaggaaaggggaaatgttgatgaatgcctagaaaactacgcaatagaagtcagctatgcctacagcttaggtgagaggctttttgaggttctgaaaagtgaagaacaaattgaatatcatcagtgtgtggtgagattcataatacaaagacttgaaaaaatcaggacgaaagtcaaggacctcttttctgaccaaaaggatgtctaagagcataaaggtcaactccattgtaaatagggtcaatatagataagtctattctagggtctagtgaaataagctcactgtacggaagtaagtatgctccacttgttttcaaagatgaagtcaaaatgatagtccctgggaatatattgggaggcccaattaagcttcaggcaaacatactgacaaaggaaagactgagcgtgatcagggggcagaagtttggcggcaacaattgtgcataccttcatctggggtttgtcccaattgtgatacaatcactacttgtttctgggaatgatttagtgaaagggagatgctctttggttgatctatcaagagggtctgaaaagacaggattgatagatagattcagcttcagattcacaaaaaatgaaccttttgcagcaaaaatcttgacaatcaacgcacctattgacataaattgtgatgcttccatcaacagtatccaaatactgcttgaattggaaggtattgacataaggacggagaggtcagtaattgctgtgattacaggtttgagctgcgtcccaacaaacagtacaataatgctcccaggtcttaaaagagagaccccaaaatggtcaatatgcaatgtattcaatgtgccggaggagtcagaagaggataatgagagattcaactctctctttaatggagctaacccaaagttgatagatctcggaaaagacactgtgcttgataatggtaagaaatttggtttctgggggccatcagtaaaaccggtgcacaggagggagctaacaacaaagaatctgatcaaagagcagatgtctcaagttatgtccgagacgatttcaaatttgaatataaatctggatgaaacaaacgaaaagggtgagttgagaagatcaaaatccatcaaagaagatgtcagcaaaattagcaaagaaaaggttcctattcgacgaagtttcagagtggatatggaggaactatatagatcaagaagacagaatgcttgcatggaaggtggacagcaatggaaatgtgaggcatctgaacacaaacactatggaacagaagtcaaggataatgacggatcggctgaaggcgatattcgggaatattgcagattactcggcgggtcccgcaacaagctttccgtcgattatagtggacttcaatgtaatgaatgtgaatgggatagagaatctgacatcaatagatgggaatttcaacctgagaacaactgtggagacaatgaaaacttacataacaactcatcaggatcagagagtgtcatcatcaactctaagggaggtttgcaggagttttgcgaacttcgcccttagctactaccttgatgatgaagatagacaaagcaacttggctgacaagatgccacaacttgcattgatggctagagaggttatgtttgatttctctgatggtatttcacctaatatgctcaggtctcatccaaataggacaaaagtgattcaggaattgaatagtagacttctgcaatctacaggaactaaagctgtgtttgaagctaggggaacagtggagtcagcagttaaccttatagtttaatatggaaagaactgagtctttcaccggtaagactataaagaactggactgcttttaataaggccaatgtcttgctaagtctaataaatgcatttgggaaagatataggtctcaaaatattcacaatgtgcaattcagcctggatcagagaatataagattttgattaaacatcagaacatgattaactatggaaaaggcaaatcaaaatcggcaatgaaaaggagggcaactaaggttgaacattgctacaaatgtggaaaatttgagcatgaagggaaatgcaacaagaaccaaacaaattcaaatcacgagtatctggaaatgtttagatgtgggccgattaagcttaaagctgaaggggcactaaggaaaaatagtatggtccagatgtcttgtgataaatttggaagggtctctgaaattagtgatgaacttatgaatagggccaactctggaactgcagaaagagtataaagagtctgcatatgcattagtagttataacttaagtaacttgctttggacgtttaagaatttgatgaagcaaaacattgcaaccatggtgcttgagagtcctttttatggacaaag

SEQ ID NO: 570 - DNA, 7966 bp, Zhejiang betaflexivirus 1
  source 1..7966: mol_type = other DNA
aacgatttaaaacaataaaatcattctgcaatgtctcttacttttcgctctcctgctgaagaggcactatcctccttctcatccgtcgaacaatcccaaattacgcgcaaggctcttgccacgttcataagtattgaagagagggaacacaccttcttcaattatgccgtcaagatacatgccaaggagcgtttgacgaatgcagggatatacctctctcctgtttcaccaataccacattcgcatccagtatgtaagatattagagaattatcttttgtataaagtcctaccaagtgttatagataatagttttttttttgtcggcatgaaggataataaatttgcagcttttaaaactagggagccaaaattagatatgattacctgtatcaatagatttgtcacaagtcatgataagaataggtactttggctggagatctgcgaagtgtagtgtatctgagtttaacactacagtggacaaatcgccttgtttaaaggacttagttccccaagtgctaagccagcgtgccagaaatatatttctgcatgatgagattcactattggagtcgtagggagcttattactttcttagaggtggcaaagccagagagggtcttagctacacttgtatttccgccagagatattagcaggttcaaaggtgagtctaaatagatggtgttatgagtatgaagttagggagtgtggtaggaatagtgcaaatggattgtttaactttagggcagcatttcgtggtgatagtgggaaaacccttttcttctaccctgacggggttagggctgaggggtacgaacagccacttgattcgggctatctgctcaaaactaggagtatagtgtgtaatgatggtactgtctataatgtagatattgtatgctctaaatttgcgcatcaccttgtaagtattactaggggtaattttgttgggaggtcatctaggtcttttggtgatttcgaagcaataactacaaggggtctgagtaaagtctcttctaacatgaaggatgcctaccccatatgctacaccactgtaaatagaatatatagatacttgaggtcattagtgaagccggacgtacagtctgccgtgtcgaagttatcacagactgtaggcgaacccacaggggcagagattaaatttgtggaggagttctctaaacttgtaatcagcacccacagtgtgaacaatttgataggcaaagatgactttaaggtgctgcaaggtcttgtggcggggacattaccaagaatgttcgcacaaaagttcaaggagtttagggccatcagtcttgatgaatttatatgtgagttagcaccttactcttttaatgtggatctagttgacctcaagggtgacacatgcttagattttatattctatgacgtcacttatggttctgtcactaaagaccccgcagtgctcatggagaaggtgttcactgaaggttccgagagagtgagattgaatggcctctatcactgtgatgagccacacacgcacgttttggaactgagtggtgcagctacaaccagacttttcagtcgatttatcagagcgtacctcggaaatttgcagcaccaatatagtgtggagaaccttagggagtgcatcagtaatttcaagaggtggttcaagagtagcaagatattgggcctttcattttattccatggaagaggaagatgcctccagaatctaccggagagtgagggctggaaaattcattcgtagagaagtgatgtttcaaagggatgggctcatttggttcttaaatcggaacatcaaaggcagtggcaaatggtactctggcaatacaaaatttattactggagatgaccgcggtattgcgaaaatggatgttgatgtgctatgcacttacagaagactgctgactgagctcacaaatgctagccaaaagctggtacaattggagataggtgaagattctccctgcctactaaataaacccacaactcagggtggggttagtgaagcactagaagcaccaaaagatgatgaaactggcaataaacccactttaggtgtaactttcccagaggcaaccactgaaccgagaggagaaaacgtgggggaagaggtagcatttagagatgaggttaccagaaggataaaagaaatgatgaatgcacgggcggcaatcattagtgtagtaaactttgaaggattgaaaattccgatttacaaactacgcacgttagggccccttgcatttaatctcactgatgatttgggaaatagagttgcatcttggtacacgaaagggaaacccgtggcatatagatataagggtggctcgcacgagtccaaaatttggttagacatgttcaacaatttgctaatctttaatggtctaccaacggattattatgacagtgtactggtgcaggagtataaagccggtgggggcataaattttcacaaagatgatgaggaaatatttgaaaggggggccaaagtactcacagttaatttatatggccagtgctacttctcattctcgagtcccaaagaaaccgtgtcttttgaattactggaagactcatattttgaaatgcctcaagattttcaagagaaatattatcacggggttcagggatgttctgtagggaggatttctatgacatttcggaggttaagctgtgacaagcagagtggggttgttaagcctcaatctacagcgttagtcgagccaagcgaccaccccactgaaactcagggaaatgataaagtgaacaatgaagttagggacactgaaactagtgggagctctgaaggaagtggggatgacgccacagaagtgagtcaatttggctttgacaagcacaaattagcgaacatcaacctggttgttaagaagtattgtgaaagtgagatgagcagaatgcttttaagcaagaaagtagttgctgagtgtaattatgagggtcttaataggatttgcgcctgtgaactaggcttaaatgagcaatacgttaaggagaaggctgaccacttcatgcaggtattgccgatcaaatcagcagagatgatatctgacttcatctcagactacaatcttgatgcatgcttatacaacttaatgggagcgattaaaatgttcaatttgcaagttgtattattcattccaggacactgtttaacaatccaggtggaaggcaataacggcaaagtcattgagctcgcttgggaagtaagcacacagtctttaaaattactccggtgtgcaaatgattgttgcataagagctgtggcggacgcacttgaaagaccagctgagcaggttattgaggtactgaggtgtaagggcggtattgagctcatggaagaggtaacctctggccaaggccttgagctagagcactttgagcaggtcctcactctttttgatatatgcggggtgtgcttcggtgattttgacacagtactgaatgagggtggtagactcctattctatttctacatcgaggatgggcatgttgagcattttgttaagaatagaagctccagtaaagataaaatagaagctcttaaaaacagggaagaccttttagatctcaaaaggcaagatggagtgattggagccagaggaggcagtaaattcaatctcaggaggggtagaaagggtcctgatcccaaggataactacattctagacctatccgcagtcaaaccagctagcaccagtcttaaatttgtgagcacagagcagaggtttaacctaattaagaatagcctgcttgttggtgacacgggtgtgctctttgacaaaaattttgacaagataggcctgttagaatccagggagtggaatgaatggagtggaatgataggggttatacttggtgtatatggctgtgggaagagcacactattcaagaaactagttagtaaaaaccctagagcctatattcatattgtatcgccccgaaaagccctcgcaagcgaaatgaagctagccctcgaagaaagtagtgacgagcaaatccggaaacgaggtcataataccacagtgtctacatttgagcgtttcgtgcagagggcattgcaaagcaaattcaagtgtgacgcgttgctcattgatgaaatacagctctacccacctggctatttggacttggtcgttaatttggtgaagcctaaggaggggacagttttccttatcggagacccttgccagagtgattatgactctctccgagacaggttgactttcagcaacataaagccagatatcgagatgctgcttgaagatagggagtacaaatataatttcctcagtcgcaggtttaggaacaagaattttattggcaggttgaattgtgtgtttgacgaaggtctaatgaattttgaggagccttatgtaatctgcaataatttcgaggaatgtcgtgccctcacaccaaaataccatgaaacatttcttgtatcaagttttgaggaaaagaaggtggtcgcagtggaatttccgaattgtgaacagatcctcacattcggcgagtcaactgggcggaatttcagatatggaacactggttataacaggcacctccaggtatgttaatgaaaagaggtgggtaactgcactaagtaggttctcacacaatttagcattccttaacctgacgggctatgggatcgagagtgtctgccagcagtactcaggattggctctaaatagattcctgacagaaaaggccggcccaaatgaattaatggagagcctccctgggaagccagttttgactaaaggattcacaagcagaatgggcaaggattatcaagtaaaagagctgaaactgcagggagatccatggttaaagacaatgataaatttgggccaattagaagatttccaagaggaagaaatgagtgaagtcattaaccaaattgagtcagtgaagacacacgtgccattatcgtatctagagggagtgagagccacgtggaatgaccggtttaaggccaaagaagatagggagtttaagataaaaggtttgataaccgaccaatttgctgatgagcattcaaagaacaacggctttaaactcacaaacgctgctgagagatttgcagccatctacccaaggcataaaagtggtgacacagcaacattcctgatgggagtcaggaaaagattgagattctcaaagccttctgtggagtgcgccaagtatagggatgcagcttgttttggaccatttatgcttagagagttcctgaagagagtgcctataaaaccagggcggtcaagtgttttttttgaaaaggctgtgcaggactttgaggagaagaaaaccgcaaaaagcactgcaactattgaaaatcactctggtcgctcaaacctggattggaagatagacacaggtctggtattcatgaaatcgcagaattgcactaaatttgagaatagatttagagatgccaaagctgcgcaaactattgtctgtttccaccacatcgttttagccagatttgcgccttttataaggtatattgaaatgaaggtcaatgaggcactccccaaaaattattatattcacagtggcaaaagtttagatgagttgaataattgggtcatttgtaatgatttcaccagagtgtgcacagagtcagactatgaggccttcgacgcgtcgcaagatgcctacattctggcctttgaagtctgtctcatggaacacttgtgtctccccaaagatctaattgaggattataagtacatcaagacacatttgggctccaagttgggaaatttttcgataatgaggttctcaggtgaagcatctacattcctcttcaacactattgccaacatgttgttcacttttttgaaatatgatttgaatggttcagaatcaatctgcttcgcaggtgatgatatgtgcgcaaatagaagattaagacttaagacggagcatgatggctttttaagcaaattgaaattaaaagctaaagtctgttttacatcatcaccgactttttgtggttggaatcttagcttctatggaatatacaagaggccagagttggtttttgagagactctgcatagcaaaagaaaatggcaatttcagggagtgcctggataactatgcaattgaactctcttatgcctacaaattgggtgagaaggtcctccccttgatggacgaaagcgctgtgcagagttactaccagtgtattaggataatcatccagtggaagcatttgctaaagagtaaaattgctttagattttgctaatagtgtgaaagcttaggtttaatgcttaataagttgattatggatgtgttgttaagtaaacttagagatagttttagttgtgttagtagtcttaataaacctattgtagtaaattgtgtgccaggttctggaaaaagtcattttattaggaccttaattggtggggattcgcgattcagggcatttacaggtggcgtaccagatttccaaaatcttacaggcaggttcttgaggaaatttgaaggaagtgttgacccgcaatttattaacattcttgacgaatatcaggcggttgacccagttcattaccccaaatttgcagcaatatttggggacccccttcaagagatcccaaagtcaatctatcctcaagcatcttttgtgggcaatgcaactaaaagatttgggaagcaaacggtactctacttgaacaagcttggaattgacatcacttcagaaagggaggacaagtttgacatagaatatattttcagtggtaagcttattggtgttgttattgcatttgaagaggagatcatcagacttttgagttcacacggctgtccatttcggcgaccacaagaagtgaggggggagacctttgatcgagtgacatttgtttgcaccgggaggagggccactgaatgtgaaagacacttggtttacatagcgatcacaaggcatcgagaccaattgaaaatactcgctgctgatgtcactaacgccacccgcggactattctaagtctgtactagccttctcaatcgggtgcggaatagctgttatcatatttgtcacaacccgatcaaccttaccctacgttggcgatgggcagcattctctgccacatggaggcacttattgtgatgcagcaaagcgagtgatctacggtaaaccatcaaggggtgcttttgattggttatacacatctggaagtgcgagttatgctatacccctaatcctctgtctgacagtcctgatctattgccttagtcccaagtcccagcttgtatgccatcgttgtggattacagcactgataggatttcttttgtgttacacgattgtggtttatattgatagtataagagtagttcataatgattgtgtgattgtaattaccaagtccagtataactattaaatcttgtgagcaagtcccagatttgtcagcactcatgaatttcaacctctcagggatagattgtactctttagattgttagattagaattgaaatgtttgctggggagagtcaggaacagtttaaagagagattggacaaatataataaaatccgaagagaggctagagatgaagggaagagtagctctgaagtgaaagcactgcttgatattgaagtggaagaagataagaagaaatttgctcacgaggagcctaccagaattagtccaccccacataaatcgaaacagcgcattgggaatacctatggcagcaaaggaggctggtgcaatggagaaaggggaatcaagcaaagggaaagaaaaagcagaagggcagacagctacacttgatgggttaaaagaagtgaaggccgctcagggcgaaatatccgatcagcaattgatgaggcacgatgctttgattaagtggtacatggaaaactacagaccttctgatgtagttaacccactcacgcaaagtggagagaagcacgtg

SEQ ID NO: 571 - DNA, 8181 bp, Zhejiang betaflexivirus 2
  source 1..8181: mol_type = other DNA
caacaatatccagcaatattcaaaagtaacagtcaatactctcacttttgttcactgcatcatggctctaacctatagaacccccatggaggatattgtttccagttttgaaccagctatgcaatcagccattgcttcaaaggctgctttgagttacaaggagcttgaggaaaaaaactttcaagcttttaattttcatctcaaagctgaagcgaagcaaaagttaagtgcagctggtgtttatttaagtcccttctccgctgtagtgcattctcatccggtttgtaaaactcttgagaatcacatattatattcagtattgcccaactatgttaataatagatttttctttgtaggtattaagaattctaagattaatttgttaaaatctaggaaccccaagctttctgttattagtgctattaataggtacgttaccagtaaggatgtttgtaggtatagtaatgattttgtagttaggagttcaaaggagatagctggcttgagtaggcataaagcaaccctcgctgaagcaacattaagagatttggtgcccaatttacttaatatcaaagctaaacacctctttatgcatgatgagcttcactactggagggaaaaggacttaattaccttcttggaggtggttggtcctgaggtattgctagcaactgttgtttatccacctgagttactagttggatctaagcagagtcttaatccatggtgttatgattttgatgtaaagggtaataagttgctatttttcccagatggggtgcgatctgagggttatgaacaaccactcaaaggtggatacttattgacagctaaagaaattcatttgcccaatggtgaggtgtattgcgttgatcttcttcatagcaagtacgctcatcatctgatcagtataaccaaaggtgctgctgttacttgtgattatcgctcctttgatggttttgaagctgtggcctttgggggtttggtgaatctatcttcaagtagcaacccctttttcccggtctcattcgatttggtatctaaaatgtaccgttatttgagatcattgaagaagccagattcgcaatcagccatggctaagttgagccagattgttccagaaccctcagccagcgaaatcaaatttgttcaggaatttgctgatttagtggtgaattgtggtaatgtaaatagtttattatctgtgagtagacttcgtcttttcctttgtcgagtctatcaaaaagtgtttccagcatggtacttagacaaaatctcttcaattaaggaattatgccttgatgattttattaggcaattaaaacctttttcttttacaaaaaaaacaaaaatcataaatctcaactatcttgaagatatgcttgactggagtgagtttgattccgaagatgggaaggatctccataaggttgtggatgaagggttcttctataacacagttcttggagattctaagagctcaattgagctccgctttagtcaaccttacattggcctggctcccttaagtgattctgctactgaaggcaggattaaattttctgtgccaagggatgccttggttaagggattgaccaagattatcatgaatagtttggcagatcaatccctttggggcataaatcatattcaagttaaagcagcactcacttccctacttgaaaatagatcaattctgctaaattcaggagtgtgttttcaagaagacctgattaacagtatagtcagtttgattaacgctaagacagttcgtctagccacaaaagtcagattcaggtttgattggggatggttcatggcctttaagtgccatagattgaacaccagattcttgactaattactctgagagctgggttctgccgaaggccacaagtgctgcttggagctctattgtgaatgaacttaacaggcagtcattcaagttgcatccaacccaatctggaaattcaaattctctcaagggtgttaactttaatgaagggagcgatggaagggataatgcggcaagtacctctggtgatcaagagattaactcccagttagaactgctaaatgttgatgcttccattcttgatcaatttggtttagcagacttgacaccagaaatgctgaaatctgctggactatctgtacccaaaaaagctaatcttgcagttttcaatcctgaagtggcagaatgcggagaggaggaaataaagaccgattcatcagaatcgtcaactaatcttttggaaattactgagggggaggatgttgagcaacttaaaggaaaagagcaaaggaaagtgattggcagagtgtcacttaaaattgatgatatgcagaactataatgtgcttcaagaggacactgatctactaaatttgatctcaaaagaccttggctacatgagaagtgaagttagtaaacgcttagatagtcttggtttatttaacttggactctgctctatccaatgaagatcaaatatttggagttattgagtctgctaacctcttattctctctcaatttaattatcattttgagtgatttccaaagtggtgggtggaaattgttggctattgaaagtggtgatccaaacgaaatttgcaagactctttggatccaagaagatggtggttctttcaagaaagtgattccaaagaacctttgtgttgtgcatgctgtatccaaagctttaagaagacgcccagatgaagtgattaatgttctctcacaaaaagattacagagatcttttttctgatctcatgcagggcaagggccttgagctcaccagattggaattcatatttgatatattttcaattcatgcatttgtgcaaataggatcggagttgattgaagtaaacaaagagggtaactgctgcgcttgctttgaccttaaggagcaacaccttgaatatattggtgctacccttaaccagattgggtgcaaattaacatctggctgcaactccaagcaggaatttgaaaggaagactataatgcatctccagagtgtggggtcagaggtaatattcaaagcaaaggtgtccagagctaaattgttagctgattgcttacactctggcaatactggggtaattagctctgagttgttcaatggcaagccacacctgctagatccctttcttgagcggaactcaaatgtgttaactgaagcaattgaatcaggtcttgagagaaaggtaatcactgtattgggaacctttggagtcgggaagagcagcctctttaaacaaatgactactggagccaggggtcagacctttgactttgtttctcctagaaaagcattacttgaagaaataaagtgtgatcttaaagttggggaggatgctaaggcaagaaagaggagaggacagcagaattggttcttcaacacttttgaaaaatttttaaacaggtgtggaaaattgaaggagtatcaacttgttttcattgatgaaattcagttgttccccagtggctatttggacttgctgtccttcttaattcaagttcccatcagtttggttgtttttggtgatccctgtcagagtgattacgatagtgaaaaagatagggattttctgggaaccatttcaaacaatgttgaggcactgctcaagaatcgtgattacaagtacaatatacttagccatcgatttcaaaatggtaatttcctgggtagattgccttgtttgatgaacgaggagaggtttggccagaacaacctgaattatttgatttataatgaccttgatgacctagctcacttgcctttagagtatgaacaagttattttggtgagttcatttgaagaaaagagggttgttaagagttacgttcccgaagccaaaaagatcctgacttttggtgaaagtaccggattaaattttgattatggaactatactcataacaatgatttctgagaggtctaatgagagaaggtgggtcacagccctgagcagattcaggaaaaacttagctctggttaattcaactggattgtcaattgatgggctagctctggtatacaaagatagattcttgggcagattcttatgcggcaaggctgatcctgagcaattgagggtgctcctacccggacgtcccattttcactgaggggttccaaactaaagtgggtagggatgaaggaatcagagaagagaaactggctggagatccatggttgaaaagtatggtagacttgtttcaaattgaagattgccaaattgaggaggtgcaagaaataatacagcaagtggaggatttcaagatccacctacccagagaagaaatggaaggtacaagaacaaggtgggttcacaggatcctgaataaggagtttagagaggtcagaatgggcacaattgtgtcagatcaatttaccgatgatcactctaagcagagggggggccagcagttaactaatgcggcagagagatttgagacaatatatcccagacatagggccaatgatacagtcacttttataatggctgtaaaaaaaagattgagattttctaagccgcacattgagaaagccaagttgagctctgctttaccttttggcaggtttttgcttaataagtttcttgaatttgtacccctgaagagaatgcacaatgtggcgatgatggaggccgcccgtcaagatttttttgacaaaaagacatcaaagtcagctgctaccattgaaaatcatagcataaggtcttgtagagattggctagctgacattgttcaagttttctccaagagccaaatttgtaccaaatttgacaacagattcagggttgctaaggcagcccaaagcattgcttgcttccaacactctgttctttgtcgctttgccccttacatgaggtacatagagaagaagcttcaagaggccttaccgaaacgattctatattcattcaggcaaaagtttggagcaattgaatgcctgggtccttacttctggttttgatggtctgtgtactgaatctgactatgaggcttttgatgcttcgcaagaccagtacatagttgcttttgaagttgaattaatgagatatttgggcctcccaaatgacctaattcaagactatctatacatcaaaactcatttggggtccaagttaggcaactttgctatcatgcgttttacaggggaagccagtacttttctcttcaacaccatggctagtatgcttttcacttttttgaggtatcaaatcaaaggcaatgagaacatttgcttcgctggggatgatatgtgctcctcaaaaaagttgattgtgagtcaggaatatgacaattttctcaagaagatcaagctcaaggcaaaggttcaacacacctcaaagccaactttctgtgggtggcacctgagcccagatggtatttacaagaagccccaattagtctttgagagaatgtgcattgccaaagaaactaacaacctccagaattgcatcgacagttacgctatagaaatttcttatgcatacaaaatgggggagcgtgttactgcccggatggatgaggaggagctgggtgcttattatggttgtgttagaaccattattaagaataagcaccttttgaagtcagaagttaaggctctctatgagagccttgattaatcctttaggtagtgaggcctagttgaaaatgaatgaactgatcagtaaacttgctgataaaaattacattcgactgggcagcaaattagggaaacctattgtcattaattgcgttcctggagcaggtaagacgactttaataagggagttacttgctgagcatagttgttttgctgctttttcaactgtaagagcggatcaagagaatttggtgggaagaaagattgaaaaattctctgaggatttgcctaaagacaagctggttattctggacgagtaccagaacttgccttccatacctgaaggtgtctttgctgtcttcggtgatccattgcaaagttgcaaaccaatctctttggaggcggacttcatttctcgcaagtcccacaggtttgggaagagtactgagaagttgctcaagaagttgaattttgaggttgaaactgaaaaagaggacactgttttagtagaagacatctttgagggtgaattggaaggacaagttgtttgcttcgaaaaagaagttgttgagctgctcaagagtcactcagtggagttcctggagccccaaacgttacaaggcctaactttcaagtcagttaccttcgtcacaacgggcacaataactgaggttaataagcattttcatctcatttgcttaaccagacatagtgattctttaaagatcttgagccctggggcggtctatcccaattgagagtgatgccattgacaccgcctcctaaccactccaacagctaccttgctgcagctattgggattagcattagtcttgttgtgcttgcctttaataggtacatttacccagttggaggtgacagccaacataaatttcctttcggtggctgttatagggacggaactaaagcagctatctataatcgtccttctttgcctaaatcctctggtactaactttagtaagctagagattctcctcggcattttgatattatccttcttgattatttacttatcctccaggaaagcaagggtctgttatgtctgcaatagggttcactgagattaaagtaatagttttggtttcattgcttagcgttttgttttactctgtttgggagtttttaaataaaagttgtgtgatttatttgactggagagtctttcactatttctaattgtcaaattaatcaggatttggttgatttgataagagaacagagagagattcttagctgtagattgtgaattactcttaggttatggagtcagtatttgatttaaataagttggtggatagcgagatggcagaaaaagcaaaaactggcgttccaaaagccactgatggcacagctctcccagatattgatgcagagctgcagaaaagattggatgatttaagagcgttcttgcgaaagactcaaagtgcgtctgagatcactaatcctggttttgagcttgggagacctgctttaaaggagtccactttcaattctgataagcacactcatatttatggaaagtggtcaattgatcaactaagtagaatagttccaaagaaaatatcaaacaacatggcaacggcagaggagatggctaaagtccagataactttggagggtttgggtgtgccaacagagcacgtggctgaagttctcttgcaagttgctatttattgcaaagatgtcagctcttcaagcttcatggattctagtgggactttcgattggaagggaggttctatactttcagattcagtcattgcggcattgagaaaggatgataacactttacgtagagtgtgtagattgtatgccccaataacatggaatttcatgctaactcataaagctccaccttctgattgggcagccatgggcttcaaatactcagatcgatttgctgcgtttgattgctttgagtacgttgaaaaccctgcggcaattcaacccgctgaggggttaatcagaaagcctacgccaagtgaaaaaatagctcataatacatacaagcgattggctttggacaaatcaaataggaatgaattgtatgccaatctaaacactgaggttactggcggcacattggggcctgagatctcccgcaatttcaatcacgccaagaagtagatatgattagctgcaagcagatcgctatctttgtgtgtttagtcggtaggcgtctaggttatgaattacaatttgaattgtgtgttttaataagccttaaggccggtccagcccggctaggcattggccgttcttcttatgctaggaagaggagggccaaaatgattgggcgttgtcatctatgttatagagtaaaccccaaattttacttcaccaagcgttgtaatggtgtgaattgtaaacctggtctcaatcatccaggttgggttgaagatttcatacgccacggcgtttattctaaggggagtaactgaggtgataccccttaaatttaaaactctcgaaccaaggaaagagtataaagagtccttgtgcatcttcagacctaactgttgagatgagaaccggttttaaagttattttcctgg

SEQ ID NO: 572 - DNA, 7148 bp, Olive latent virus 3
  source 1..7148: mol_type = other DNA
gcatacaaatacaaatctctctgacctcaccagtttcgagagaattatttgttctacggattccgcttcggcacgaatccaccaattttccttttgcttttctgttcctttagcgccttgacggcagctctaaaccgccaacttcaagctccaattccccgctcactcaatctccatcttgcgacatggccgcttcatggacttccttctcctctctcctctccaaccctctctccctcgcccagagaatcctcaccccccctcacaatccttccattccctcccttcccaaatctggattccgatccgtcacctctctctccgatccctctgatgctctcacccgagctcagatgttctccccaaccaaagccattctgtctcctgccgcttccccaaccccagctagccaacccgatccacccgccgaaccgtgctctgatccccccactgaaacgactgtcccatcctcaaaacgtgctctcttggactcccattctccgtcccccgttatacctgtggatgaaacagcccctatcagccctcccatcagactcaccggttctggtctcaaagatctcgttgacttcctgaaccccaccgttcatcgagacacaattgccgcccctctcctcgaaaccatatctcaacccctccgagactccctccgaacttacccctggtccgtgcccccctcactccaaacacacctccaatccctcgggattaacgcccataacttcggatacaaacctcaccctcaccccgcccacaaggttatcgagacccatctcctacatgagcattggcgccacctcgccactcagccttctgctatactatttatgaaaccctccaaattccagaagctccacaaccaaaatgacaacttcaccgaactgcacaattacagattgacctctaaggactccacccggtatccggagacctccaggtccatcccaaacctccccagcatcttccttcatgacgccctcatgtatttcaccccctcccagatcctcgaccttttcgaacgttctcctgccttggagaagtgtttcgcttcgctcgtgtgtcccccggaatcaaatttcaccgacatctcattctacccagaactctatcgcttccgggccgtcggcgactccatcacttacgaactcgaagggaatccagcctcctcttatacccaacctaaatccgctattgagtggcttaagatcaccaccatcaaaggcccaaatttctcactctccatcaccatcctggagtcgtggggcccgtgccattcacttctcatccaaagagggctccttccactccaccaggaacactccacccaagccttcaagacccccgaggctatcctcctcccagccccctctcacctccaacaggatctcagacaccgcctggtcccaacccgagtttacgaatctatcttcgtttacgtccgagcagttcggacgttgcgagttactgacccttcaggctatgtccgcacccaatcatccaaacccgagtattcgtgggtcaccacggctgcttgggataatcttgccaactttgcacttctcacctgcgcccatcgacctcgagcccgatactacctgtactggagcacccttgaccgcctcatgggctggattcgagctcacaagctcgcccttctcacggcctcgaccccccttgcctcccttggtctcgcctccagcgctcttctcgcttgcaggcctttttggatgcgtcttgactctctccaactccttaacagatgggtcatcaaaccctcatttccgcgcaaccttccattcctcttgcccaaggctttccaacccaaggcttctctcttcaaagccgaatttcttccccgccatgccccatcccgcatcctccccgaattcttcgacgccctcctcaagaaagcccccttcctgcgacctctcttctcagatgctccaattccctcctgggcttgggccctctgtgctaccggcgttgccataccaatcatcgccctgtccatccgacgattcttgggacccaactcacctcaagccctccttgacgagtaccagtcttacttccaccccaagccttggcaactcatcttggagcaggggcccatcttcgccaatcctgagcctttctccccccattgtcaacccattccatcgtccggcccagactccgccccttcttccaccctagggacaccaccaatgtaccccagctcacccccagccccagtcgaagagaaaaccatcctagtcccaacggtccgcgccctccccccagctccgcctccatcctcagtcccacctccctccaagccatctcccgccgccccagctccggtcaccccacccagcctcccgaccccagtcatccccccactctctacgcccaccccagaaactcgcgtgcctgaggttggtaagtccggcattgttgcctcagacctcccaccaacagagatttccccaaaccccactcttgcccgatgtcgtcccaacttccttggactctgtgccccccaccccaactcgaaccccagtcatcctgagccctccgccccatcccccttgatcaccgacccttccggatccctcactgccatcaacccaacccttgaaccgttcgaattcaatcacgccctccttggcgccgacccttcaggccaaggccccgtggctcaattcaacgagttgtttccatccaccctctggctccaaggcaccggtgagttcctcacccgatcccgcgtacaggccccctcctcagcaccttaccccgctatggactgtctcctgcacgcgatccacacagccacccgaattcccaaaccgaccctgtgggccggattgtgctccaatctacctgattccttcctcgacccccaactcatagctaaacatggtttatccacggaccacttcgccgtgctagctcgcctattctcccttcgctgcaccttccaatcccgctctggaacccaaaccatgggcgtggctgatgccactcacaccttccgcatccgccacactccacccaccgaggacgcccctggtcactttgagtacatggaggagatccctgaatcactgactggcgccttcgcacaagatctcgcccatttcgccctctctttccgctttaacggttacctcctccccttcaagcatgtacacacctacacttctaacgtctcccgcgccaaaaatctcatttcgaacatgaaaaacggattcgatggagttatggcctccgccgaccctctccatcctggccagacccgcgaaaggttcctctcgatggacaaccaactcgacatcgccgtcccacgcgaaacgagattgatccacatcagcggcttcgccggctgcgggaaaacctatcccatcacccaactcctcaagaaaccggtcttcagacagttccgagttgcagtgcccaccaccgagttgagatcagaatggaaggaccttctcacccttgaacccgctgatcgctggaggatcggcacatgggaatcctcccttctcaagagcagccgagtcttggtcatcgatgaggtttacaaaatgcctcgcggttatcttgatctccgccctacacctctgattcgtcccatccaatttgtcatcatcccttggcgatccccctcccaaggtgagtataactccacccacccccattcatcaaacctccgaatcacatcagaaatcatccacctccaaccttacattgacttctattgcttttggtcctacagaatcccgaagaatgtggctgcgtgcctcaaggtaccaaccacgtccaacaagactggcttcatccgccgcctcaattccatcccgaacgccaacaaggtcctcacctgctcccaaagttctatgaaaactttgaaccaatgtggtttctccagcgttaccatagcctcctctcagggctctaccctccaggaagcggcttgcatccatcttgatcgcaactcccgcaatctctccaattcccattccctcgtggcgatcacccgcagcaaatccggcatcatcttcacaggcgacttccaccttctcgacggcaccacttcctccaactaccttttctcatgcttggctcagggcaagtctgttgaccttgagatgcttttcccgaagactttccctccctgccctcgtctcctccagcccatccgatcccgacgaacaatccttgtcggctcctcagaggactgggcccagttctaccgcccaactcctctcgaagatttctccagattccaagccacccctgtacccgaaacagctattccctgccccaacggctatcagggttcgcccgagatgatcgaaggcccctcacacgccaacctccccttcgaagctgaccttgactccatcgacccattggaaggcgagacctcaccctactccctaggtttcggcgtacacgccagaactgctcgcaccaccaacccagaagccactggcgacatcatcacccaatcagagatcgtcctcggagacggtgagctgaatatgccacaggtctcaacccacttcctccctgaaacccgccgtcctctccactttgacaatccctccgcgctgccctcctccaccgtcccctccccggtcgatctcagtcgcactgcattcgaacccgtttacccaggcgaaactttcgagaacattgccggtcacttcatgggaccccgtgaccccgaagttcttgagatcatccacaacgaccaaatgtccaatcagttccctctccttgaccagcctttctcattggccgcccaaccttcatctctcatggctgccatccacaactcccagaacgatcccaccctactcccagcatccattggcaaaaggctgagattccgaccctccaacgctccttaccccatcaccgccgaggatcagatcctcggctccctcctgttcgaagccctttgtcgcgcttaccggcgacacccagaagccgtcgtgcccttcaaccctatcgcattcgccgagtgcataaatctgaatgagtatgcccagttgacctccaaaactcaagccgtcatcatctcaaatgcccgccgatctgatcccgattggcgctactctgcagtgcggatcttctccaagacccaacataaggtcaatgacggctccttttttggttcctggaaagcctgtcaaaccctggccttgatgcacgacgcagtcattctcctcctcggaccagtcaagaagtaccagcgtctcttcgactctgaagaccgaccttctcacatctatatccatgccggacacacccctcaagacatgagcaactggtgtcaacagaacctcacagattccattcacctcacaaacgactacacctccttcgaccaatcccaacacggcgaggccgtcgttcttgagcagatgaagatggcacgactttccatccctcaacacctcattgatctccacacccaccttaagtgcaacgtctccactcagtttggccctctcacctgcatgcgactcaccggcgaaccaggcacctacgacgacaactccgactacaacctggccgtgattcatctgcaatacgccgtcggttccaccccctgcatggtttctggcgacgattccctcctagactccaaacctccaatccgcgatgagtggaccggaattgcccctctcctcgctctccgcttcaagactgagttggatcgttactccctgttttgcggctacttcgtcggctcttccggcgctgttcgctgccctcgagcccttttcgcaaagatcatgatcgccgtcgatgatggttccattcccctcaagatcgcatcctacctcacggaattcagcattgggcactcgctcggcgatgaattctggcagctcctccccgttgagcaagttgtcttccaaagcgcttgcttcgacttcttctgccgcaattgtccaccagccgccaagctcctcctccgcctcggtgaagcgccccaatcaatcctagaagcaacttttggtaagctcaaatgggcctccaacgcggtttactccatgctctcagccactgcccgacacctcctcatcaaatcccggctcacccgaccccccccagaaagcgtcgaggtctcccagctacaaggtcaattgcttgcctcttttcaacattgagcatgcatgttttctagagcttccaagaaatccaagtcgccctctcagagttaccagcctcggcagccagccaccccgacctctgttctctctcctccctcctctccccctctgtccccaagcacattcgctccccctcccgagccacctccacctccgccccccccccctccacctcccccctccgtccaaggcattcctctccacttcatggccaataccacgcctcccccttccggtcctgctcctcctcgtgatgatagggttgatcatcagccttctcttcccctggcgccgcagatccaagaaaccacctcttccgtcccgcatgtagatatcccattccaatggttgtccgcttcgctcaccggcgaaaaggatgtccagcagaccgtgtctctttcagcctctcagactctctccaaactctgggccctttaccggcacgctgaattgcgttcggtcgaggctgagtttgtccccacagcctcatccttctcaaagcccatctccatctcttgcgcttggacaatcgcctcaatcactcccgcctccggcgatgagactgactacttcggtggtcgatttctcaccatcggcggcccggtcctcctctcttccaccacccacattccatgtgacctccgttccatcaaccctaccctccgctccagcgtggagttccgcgacacccctcgcgtcactttcaccgctcgcgcggtcgccggcgccaccgccaacacccccctggcgcacttcatcatccgaggagttcttcgactctctggtccatccggcgccaagtttgcttgatcttcaaaatcaagataggtgaaggaaaacacctcccaccttgagttggtctttatgctaaaccaaagctttctgcaatttaaatcccgaaagttctccattctagcaatagattacgtcgtaagtcggtagcaagacttttcgttt

SEQ ID NO: 573 - DNA, 6337 bp, Andean potato latent virus
  source 1..6337: mol_type = other DNA
gtatttgtacccagaataatcctttgctagtcaaacattattcttttcttttctgtaaaatttctgcacacttacacgcctcctcaggacccgtgtttgtaccctgtaacctcttgtgtcttcttcggaccacacttgaatgtctaatgtcttttcaaacagctctcgaagccttgaactccacagttcatcgcgacgcagcaacaaatccgatactgaactctgttgtcgagcctctccaacagtctcttgttcagtacccatggcttcttccaaaagaagtccttcccttcctcctgtcctcaggaattcccaactctggcttgggaaccactcctcatcctcaccccactcacaaagtcatcgagactttcctcctttacaaccactggtcttgccttgcaaaccagccctccaccatcatgttcatgaaacctcagaagttccaaaaacttcggaatctgaacaacaatttcacccatctctgcaactatcggctcactccagccgacaccacaaggtatcccaccacctccctacatcttccaaacactcccgtcgtcttcatgcacgacgccctcatgtatttcaatccagctcaaattctggatctcttcctcaactccccgatcatcaactcgctctactgcagtctgatcgttcctccagagtcagacttcaccgacctgtctcttcagccaatcctctaccagttctcaatctccgggcagactctccactatgtcccggaaggccacaacgcaggcagctacaaccagcccctgcacgctctcgactggctcaagatccacagcatcctctcacgagaactcaacctctcagtgaccaagctggactcttggggcccggtccattccattctcatccagagaaacctccctcctcttcatccagctcgccagtctcccatcaatcactctctctcaagtctctttcctcagcacaatcgcgcccctcgcgcactgagaagccaaagagactcttcccagcaccttcaaagcgccctccaggctttgttcccacctcctcaagctgctcatgccctggcatccttcaaaatcccggaatgcctcgagctcccctcagccacctttctaaaccaacctctccgccatcgtctagtcccactgcaagtttacaatgctctcttcacctacactcgagctgtccgcacacttcgcacatccgaccctgctggattcgtgcgaactcaaagcaacaaagccgagtactcatgggtgactccaaatgcttgggacaatctacaaaccttcgctctcatgaatgctcccatccgccctcgagtgttctacgagtttttcctcaaccccttccagaaactaaaactccattttcgtcagcactggaaaaagtaccttacccttttttcccctgtgatttcgattttggttatttcacctcaactcctcccaatcaagtcccccatcccaaaactccagctagtctccattttccgcagtcaaaaactgcccttctctcacatcaagctggagaaccctctttatctcaagaaattccttccaccaaagctcacccaaagaagaaatttctccattcctataccaatcgctcttggcaacattctgctccatcttcacaaaatcaatccatccctcgccccagttccacccattctaccaaggttccagaccatccccgttctcttaagggaccttcctccaagagcttccaccaccatcccactactggcgctggtcccaacctgcatcatcagttggctccatctcttctcggcgctccccctccaacaaatccacgatctctaccacaccaacatgcacccctcccagtttcgcctgcaatgggatttgcaaccaatgcatgtcgactctccccaacccttccttccctacctcctccccgcgcccacaaatccctccacatttccccaaactcctcttccagtgactcctcctatctctccgcctcaagctcagagagccacacccccgccagcaccaagcccttctccaagctctccagcagaatcagagcctccaatcggcttggtttcctcctcaactcttcccccttcttcaactactcatcagactcctcctcctcttcctaacctatctgatgatcttcttcaagtcatccctccttcttctgacacccccccgtccataccacctgactctactgtcacctacactggagcgctcaaccactccatttctcccactccctttgttccacaacatcttccagccgaacctatcattcccccactgatggcggatcctacctgtgctggagatgtcatcccatttcataatgcctttcctggtctctacttctctaacactgcaagcttccccactcggatcaggattctcccatcttccaatctccctgtccctgctctcaattgcttgctggaaactttttcccagctcactcactatcctgtgctatctctatggcagtctctctgctcaatgcttcctgactgccttctcgacaacgaagagattcgcactgtcggtctttccactgaccttctcaccgccctctgcttcacctaccacattcaatgcatcctccacactccttctggcaatcatccctatggcatgccagcttcctccacctccatagaaatagattacctcccaggccctcccaggcatttttccccccacaatcgtttcattgcttcagctcccggctccaacccttcttccgaaccccttgttcgcgaagctctccgcttcaaacacaatggccattttctacctttccaccaagctcatctccattctgtctctctccaacacgccaagaacctgatttccaatatgaaaaacggttttgatggcatcatgcattcaatttcaacttcttcctcctcttccccatcaccaaagcaacagatcctcactctcgactcaatttgtgacgttgctcagcccagaactgttcccgtcatacacattgctgggttcgccggttgtggcaagacccatcccattcaaaagctccttgcaagcaaaccattcaaggacttccgcatttccactcccactaatgaactaagatccgagtggaaacgagacatggatccttcccccagcaatctctggcgcttttcaacctgggaatcttctctcttcaaacactcttctgttctgatcattgatgaggtctacaaactcccccgaggctaccttgatctctcaattcttgctgaccccaacttgaaactcgttttcatcttgggtgatccactccagggtgagtaccattccaccaaccctcatagctccaatatccgccttccttctgagatcgatcgtttcaggcgctacattgattgctactgctggtggacttatcgcctccccaaacttgttgctgagctattccaaattccaactttcagctcagaacaaggttccatcattgctgtctcctctcatccccctggctcaaagaacctcgtcaactccacgtccactgccacttccctccagcaaatgggccaccatgccatcaccattagcagcagccaaggtatcacctttcctgagatcaacaccattcttctggacaggcataccaatctgctcagccccaacaactgcctcgttgcaatgacccgatcccgcaaaggttttgcatttgttggcaatctccacctagcctccaactccttcggcacctcctacatgttctctcaagccctggcccgccaacccatcaatatggccaattgcttccattccttccaccaactccttcttctccatcatccaatcaccactagaaaccttaggtttgtagctggtcaccaatccacccttcccaatgttcacaaagcccaccaaaaactttccacttctggtaagctttctcttcctccccatatcccaattgaccatgctgaagacttcatcatcacaaatccagttgtctttggcgacgccattgatccccgtcttcccacaaaccatctcccccccacccgtctccccctccacactgagctgctaggaaccaatccttcttccaccgactcatcatctcctgacctcctcttcaacacacccttctctctcggtctttctggcgaaacctttgagaatcttgcagcccacttcttgccagctcatgacccttctctcaaagaaattctttatcatgatcagtctagtctccagttcccctggcttgacagacctttttctctatcttgtcaaccctcttctctgattgctgcaacccactctccttcacaagattcaactctactccctgcttccatcaagaaaagactccgcttcagggagtcagatcagccctaccagatcaccgccaatgaccaactcctcggccagcacctcttctcctccctttgtaaggcctacggacggtccccactcagctctgtccctttcaaccccgtcttgtttgctgaatgcataagcctcaacgagtatgctcaactctcctctaaaactcgagctacaatcgttgccaatgcccagaggtctgaccctgattggcgtcacaccacggtcaagatctttgcaaaggctcaacataaagttaatgacggttccatctttggatcttggaaggcttgccaaacccttgccctcatgcatgactacatcatcctcatcctcggcccagtcaagaaataccaacgagtcatcgactccaaggatcgaccacctcaactttacattcattgtggtcacactcctcaccaactttcttcttggtgccaaacccatctctctggtcaaacttacctcgccaatgattacacttcttttgatcaatctcaacatggcgaggccgttgttcttgaacttctcaagatgcaacgtctcaattttccatcttttttcttagatctccatctccacctcaaaaccaatgtccagacccagttcggcccactcacttgcatgcgcctcacaggcgaacccggcacctatgacgacaactcagactacaatctggccgtcatattttccaagtacttaatccactctcaccccatcatgatttctggagacgactctgtcatctgcggaaatccttccattcatcccagctggtcttcaattgaacccattctccacctcaagttcaaaactgaaaccaactcccatcctctcttctgtggctattatgtctctccccttggtgctgttcgcaatccctttgctctatttgccaaactcatgatctgcatcgacgattgcactcttgatgacaagattctttcttatttgagtgaattctccgttggtcacacacttggagattccttaattcatgtcatcccatcagccatactcccctatcagtcagcctgccacgactttttctgccgcaactgcaccccatcccaaaaactcctactttctttggatccccttcctgaatccaccattctccggctcatcctcaaaattaagtgggcatccaaagcctttttctctctgttaccttccaaagccagggatcttcttgtctcaaaaggctcactccaatcaatgccgttcgatcccaaagttacccaacttgagtctgaattgcttccctttttcaattcaacttgaatcatggcctcatccaccgccaccatcgccaaacaaccttccatcaatgctcccggccatgtcctccccaccccctcttcagaactatctccatccatggttcttcccttccaatttgtggccaccacatttggaatggctgaaacagctgcccaaatcacccttgtttcctcctctgctatcaacaagcttatgctttcctaccgccattgtcaactcgttgagtgctcagccgagctaactcccttggccggcgctgtttcaaatcccctctctgtcagccttgtctgggtttccgcaaattctactggagctcccaccgatattctcaatatctatggtggttcctcttttgtccttggaggccctgtcaccgctcccatcccaatctcagtacccctcccattcaactctgtgaatgttgtcttgaaagacagcaccatttacactgacactcccaagttgctggcttactctcctctcccagcctctccttccaaaactccaaccgcgtctctacaaattcgcggcaaactccgtctttcctcccctcttctccaacccaattagcactcatcccctccatcctgtcggttcaggttaaaaatcatgtaattgaaggcagtccttctccctttagcacacaaaggtcaaatcgggtgcgactcccccccttttccgagggtatcggaaac

SEQ ID NO: 574 - DNA, 6175 bp, Asclepias asymptomatic virus
  source 1..6175: mol_type = other DNA
ggtaatctttaccgaacagtcctctgatcacagacagctgttctttaatttaattgtcaaatacgtctgccaatgagcaatggcttttcagctcgctctagacgctctctcccaaacctcccacagggactcgtcccttcaccctgtgctggactccgtaatggagcccatgcgcaactctctcaccacctttccctggatggtccccaacgacctccagccctttcttctccaagccggaattcaaacttccggattgggcactacccctcaccctcatcccgtgcacaaagtgctagaaaccaatcttctcttcaaccactggcacttccttgccaaaactccatcctcggtgcttttcatgaagcccgagaaattcaacaagctccaaaagagaaatccaaacttctccgagctcctgaactaccgagtgaccccaaacgactcggtccgctacccaaccacctcccctcacctcccaaaaacagacgtcgtcttcatgcacgacgctctcatgtactacactccagaacaagttctggatgtcttcctccgcattccaaatctgcagaaacttttctgcagtttggtagtgcccccagagtcagagttcacgaacctctcactctcaccaaatctctacaccttccaacttcacaaccagacccttcactacatcccggaaaaccactacgccgggtcttacaaccagcccctatcggccattcaatggctaaaaatctcttccatccaccacccccagattcaactttctgtcacaatcctggaatcctggggccccctccactcaatcctcatacaaagaggcctgcccagccaacatttggccggtcccaacctcttttcatcccttctccaccccctcccctcccctgcagccgacctaatctcattcaaaattcccgagtgcatcgagctgcctcaatccaccttcctctcccaaccccttcgtcaccggctcatcccaaagaaagcctacgacgccctcttcacctacacaagagcggttcgaaccctccgaacctccgaccccgccggcttcgttcgaacccagtcgaacaaaccagaatactcctgggtgacttcaaacgcctgggacaaccttcaaaccttcgcgctcctgaactgcgccatccgaccaaatgtggtctacaactttctccgcaaccccttccaaaaactcaaaatttatctaagccaacactggcgccgcatcgtagcggtctccgctcccaccctatccttcctaaccctccttcctcacttcctaaactggtctttatctctcccaaaggtaaagtgcatttcagccttccgccaccgcttcgaccagcccccccctcaacctctagccctccaaattttccacaagctagtcaaccatctacccccccaagttctccagactctttcaaaagtctgccaaaccttacatctgccctcacccctccccccaccccgacccggaattctcccgagtttccgcatctctcattccgcctatcccatcaggttcccaacctggctctccctcctcgcctgcttggtgccggaacttctagttctaggctcaaagctcaccggcgatctgtccgtgcaacagcagcacgacctctaccaccaccatctccacccagcccaataccacctccagtgggaaagacttccctactcgacgacttcgaggcaaaactttctgcccttcgagcccgtcgccactccatctcctcctcaagctcccctcgctcaacccccccccaaatcccggagcaccagcccccagcacttcacttctcccagctggagctcaacccaactttccccccacctcagcccccttcccacccaaccctcttcccccccccccgacttcatcaacatcccagtctccccctccaccacctttcgacaacccaccaccagcttcctcaccaactcctccccaagaactaggagcctctatgaatatttgctccagtactaccaccccggcccccccccccttccccaacccgcatctaacggatgccactgcgagccctgcacccaaagtgaagcatccagccccacccaaaactttcccctccaagacccctcctccccctacattgttccacccgacccttcaaccccaattccagagccccctctactgaaagatctgtcttgcactggaccgatcctcagcttccaagacctctacccccgcaactactacccaaacaccgcgctgttcctcaccagactccgcatcacccccccaaaaccactccccctcccaccgaatgactgcttgctccaagcaatctctccttctttgtcagtcagtccatccagactttggcttgctctccaggaaattattcccgactgcttgcttgacaatgaagaagtccatcgcttgggcttgtccaccgacctcctgaccgctctctgccactacttcaacttcaaagccgaggtaatttctgacgggacctctctgcactacggaatctccgattctcccgtccaaatccaaataatacatacctctggctctcctggccactacagccctcccccaaaactcactggcgccactccaccaagagaaccgccccaccctcttactgaacagctcctccgcttcaaattcaaaggagctcatcttccattctccaaagtccattcttactctagctccgttgcccatgctaaaaacctagtgagcaacatgaaaaatggctttgatggaattctctctcttgtcgagagcaatgttaagcatgctcctggctgttctcccagagataaaataataatgctggaccgtctccttgataatgccgcacctcgctcagttcatttaatccacatagccgggttcgccggctgtggcaagacccatcccctccagcacctcctcagaactaaacccttccataacttccgagtctctgttcccaccaccgaccttcggaacgaatggaagaaagacatggctcttccttcaagtcagtctcatcgcttcaacacctgggaatcctccctcttcaaacattccaatatcctcgtcattgatgaaatctacaaactcccccgaggttatttggatctctccatacattccgacccttccatttctctcatcatcctccttggagaccctctccagggagagtatcattccacttccccccactcttccaatcaccttcttcaatcagaaactgagagactctcgcaattcatcgaccactattgttggtggacgtacagagtcccatcccacatttctgatctttttaacgtcccttcctacaaccaatcccacggacctttctttggaactgtccgactggcctcatcctactccccaggacaacacaacctggtcaacagcatggcaacttcagccgctgtcaatcaactaggctatccttcctgcaccatcagctccagtcaaggaatgactttccgcaaacatgtaacaatcctccttgacaaacactcccgactcctttccccaagtaacacactggtagccctcacaagatccaccgctggcgtggaattccttggagaccccatgtctctatccggcaccaacaactcttctgacatgttctccagagcgatgcatcaaatgccaatcaatttggcaacctgtttcccgagaatcttccacaagctcaaccttcttcgggaaccaatcaaacatcgatccaagagactccttggatctcgacccccctccccaatttacctcaaccccaagaaaatgcaccttccccctcacattccaatcgattatgcactcgattacgtgttgcacaaccctcacgtctttggctccaaagatgaccctcgactggaatgcaactttcttccccccactcgactcgccctacactccgacttaatctccgccaatccctcagtcccaagcctccagcctgttgactccgatttccgcacaccaatcacccccgtttatcccggcgagaccttcgaaaatctcgcggccttcttcctccctgcccatgatcctgagcttaaagaaatactctacaaggatcaaaacagtcaacagtttccctggtttgaccgccctttcgagctatcttgccagccctcctctcttatagccgcccgacacagtccttcacaagacccgaccctcctcccctcctctattaagaaaagattgaggtttcgcccatcagacaacccccaccaattctccgccgatgaaataatactggggaatcatctgttccactcactatgccgagcctacaatcgaaacccaaaccaaactctccccttcaatccttccctcttcgctgaatgcatagctctcaacgactacgctcagctctcctccaaaaccaaatccaccatcgtcgccaatgcttcccggtctgacccagattggagacatactgccgtcaagatattcgccaaatcccaacacaaagtcaacgacggctcgatcttcggtccttggaaagcctgtcaaactttagcccttatgcatgactttgtcattctcagcttggggcctgtgaaaaaataccaacgacttttcgaccaagctgaccgaccctcacacctctacactcactgcggcaaaaccccgcaggatctttctctgtggtgttcagcccatctctcccacaaaaccaaagtcaccaatgactacaccgctttcgaccaatcccaacacggagaatccgtcattctcgaagctctgaaaatgaagcgcctctccatccctgagcacctaatcctccttcacatccacctgaagaccaacgtctccacccaattcggacccctcacctgcatgcgccttactggagagcccggcacttacgacgacaacactgactataacattgccgtgctctactctcaatacaacctgcaaaacacccctgtcatggtctctggagacgattcgctcatcgactccaaatgccccgaactcctctcctggcccacaatccaatccaaactgcatctccgcttcaagaccgaaaccactgactatcccctgttctgcggctactacgtcggctcatccggagccatccgcaaccccctcgctctgttcgctaagctaatgatcgctatagacgaccagtctatcagcgagaagaggcttagttacataactgaattctcagtcggacattcacttggtgactctttctgggatctcctccccagcgagattcatccgtaccaaagtgcctgtttcgactatttctgcagaaactcccccccccatgaaaaatccatactgcacaacctccccttcagccccacagctctctccactatcaccagctccattaaatggctctccaaatctgctttctccgctctgcccatgcgaatccgccgagcagccatagagaagtctcaattaccctcttcccacgagaacccagaagtttcccgtctagagtctgaattgcttcacaattttcaatagacaatggaaactgaacgagtcctcgtcacccaacccgccatttccactcaaaccgaccttttgtccatcccttcttctcccaacccacccactatcacccagcctttccaaatcgagatcgccgcactaggcaaagagtcttattcagactccatcagcgtggccgctctctcctccatcgctgcctacaccagcctctacaaacatgccgagctccattcgctctcggcaactatccaccctaccaattcagccccctccaacccgaccgccgtcgccctcgcttgggtaccctacaactccgccgcttcacccactcagattctgagtgtgtatggcggcatgatgttttgcatcggcggctccatccaaactcttaagcctatcgaggttctctgtgatctctccaaggtcaatccgatcctcaaaagcaacgtcaccttctctgacactcccaaattactcatccagtcagtagctcctgaccccccctccaaactcccaacttgctctatcaccatcaaaggcatgatccgccttcactctcctctcctccaagcttcggcctgagctctcaaggtcacagctcgcgagtgcgaggcctgctaccctcacacagcaggtattggggtgcgactcccccgtctattccggacgtcaccggaacca

SEQ ID NO: 575 - DNA, 6035 bp, Erysimum latent virus
  source 1..6035: mol_type = other DNA
ggaaaattatttcaatcagaaaactctcttcatagacttgttttcttccttcccaccccctctaaacctctcttatccaagatctcgtttagatttatggccaatggcttttcaactagccctagacgccctatcctccaccactcaccgagattcaatctcggctcctcttctcgactcttctgtgagtcaactccaatcttcattggaactattcccctacactgtcccaaaggaacttgtcccccagctcaatcgcatgggcattcaagtctccggactaacctcaactcctcacccccacgctgcccacaaaaccctggaactgaaccttctcttcaaccattgggcaaagtcctgcaatgtggactcagccgtggtcttcatgaaaccctcaaagttcttcaaactccaagagaagaactcccacttcaaatctcttcacaattaccgacttcaccctcacgactccaatcggtacccacatcccagcacaagcctgcctacagagaagcgattttacatccacgactccctgatgtattttacgccgcaccaaatctcaggtttgttcgaaagttgcccaaaccttctcagtctgtacgccagcctcgtcgttcctccagaaagctcaatgaccgacttgtctctaaaccccgatctgtatcggtactcaatccacaagtcgactctccattacacaccagaagggcactcagccggcagttacaatcagcccgtcaacgccctcgattggctgaaaatctctgcgatccaaactccatccctgagcctgtccgtgtccgtcctggaatcttggggccctctccattcccttcttatcgagaggagctctcaaacacaaaatccagattctcagaagataaaggatctgatttccttccaaaccccccaagctctaattcttccgaacccggactccctggccgtccctctcaggcaccgtcttgtgcctcagaaaacttacgacgccctcttcacttacactcgagcaacccgaactctccgcacttcagatcccgctggattcgtaagaactcagtcaaacaagcccgagttcaactgggtcacatctcaagcttgggacaatctccaaacctacgccctcttgacagcctcttacaggcctcccgtgtcctacacgctacatcggtctcctcttacaaaactcaaggagcttctcacgaggaatgctttaaaactcgcagcgatggcatcaccagctctcactctggccatcttcaccacaatgaccgcgttgaacaccaactccagcaaggccctctccttcagtgctctcaagattcacttgctgaacccacttacaggcccggaactccttcacttccaaacttctgtattgcagcaaaagaactcagctccactcagccaagctgaggcgaaacaagaattggacaagtcagctgtgccagcaccttctgaacatgactctagcgcctctcaatcaactagcctctctctcagcgcttcttcccaacttcttagcaccgaaaagcatcccggctccgagctttcttccaaagctatcccggtctctacatcctgcccctctgcttccaaacagcttgctcctccgctcactgctgagtctcactcctcagtcaatgcgcttctgcgcaaattcctgggtcccaactctcctcaatccaatctggacaattacaatttgcatctacatcccgagtcgttcactctgggctggaaacgacgacccctacttttggactctcattcaagtttcctaccctcttcttgccttcaacctccagcatctcccagcatagcagcagctcctcaccctcttcctcctgctcagaagcctccccggccacctaccactgtgcccactcccaaacctctagcttctccttcccaaactcaagctgctcagccggccacacaatctcctccttcgattccccaaacagccccagttacttcactcctcccggctcccctagaaactgatgactcatgcgctggcccaatctccaccttccaggatctctttccagccagttactaccctcacacagccaacttcccctgccgatcaaaaataccgggctatcttgaagctccctacccccctctggattgcatgctggtcgctctctctgcccaaatgcctcaatcccctcaagagctgtggtcagcgctcaacactctaatgcctctaagcgctctcacctcacccagcctccgagtcttaggtctcggcaccgaggagctcactgctctcagttactattatcactttcaggccgagattcattccgacaatgaaatatatagattcggcatacaaactgcttcaaccaagctctgcctcattcgggattcaggacccccagctcacttcactgctcctgatcctctaagagccggctcccctcccagcagatcccagaccaatgagaattctctacgccgctcacttctaggcttccgcttgaatgggaatctcttgccgatcgatcaagtccacagcttcacttctgagccctctcgcgcaaagaaccttgcttccaacatgaaaaatggttttgatggcattcttacaaccctcgctgcgctctcctccctctcctctggaccctcaccccgcgatcgcatcttcactcttgatggcatctgcgattttgctctacccaaaactgttgaccttattcacctgtccgggtttgccggttgtggcaaaactcatccaattcaacagcttctcaaaacccctcacttccacaacttcagggtggtcactcccaccaccaaccttcgatcagagtggaaatcagacatggctctcccagcacaccacaactggagattttcaacttgggaatcagccctcttaaaacatgccgaaatactcgtcattgacgaaatttacaaacttcctcgaggatacctagacctttctctcatagctgatcccactgtcaagctcgtcatcctcctcggagacccccttcaaggcgagtatcactcaacttctgctcactcctccaacttgcggctcagctcagaaatcccaaggttgctccctttcatcgactactactgttactggagctaccgcgttccaaaatgtgtcgcaaagcttttctccctgccatgtttcaacccctctgaaggcttcataaagactactctggactttttccccagcgctaacaatttggttaacagccactcagtagtccacatctctgaagcttgcggctggaatgctgtcacaatatcttcgagtcaaggatgcaccttctccgaccctgctttcatccaccttgatcgtaacacagctcttctgtctccctcaaactgcctcgtagctctcaccagatcccgctctggagtttacttcaaaggcgatttcacatttctgagctctctctccggttcctctcgaatgttctcgttagcttactctggccagccgattcaccttccagacttctttccagagattgtcttccaactcaacatgataactgcccctctgacaaaaagaagttccagctttcgatccgggttccaacccaacatctcttctgccccaaaaatcccggcccctccaaatcttccctgcccccctcatatcccaaccaattactcgaaagacgtcattgtgaacaatcaagctctctatggtgagtccctcgaaagacgtttgtctgttctgcatctgccccccactcgcatgactcttcattctgacatcaatatcaccgcaccttcaagcagcagtttccagccctcagacgagccagttccttctgaccacactgctgtctaccctggctttgacttcttcactctcgccgctcactttcttccagctcacgacccagaagtcaaagaaattgaactcaaagaccaaaccagccaacaatttccctggctgaatctagacttccacatatcatgccagacttcttctttgatctctgcaaggcaccaacccgggtcagactccactctccttccagcttcactccacaaaagactccgatttcgccccacagcagctccataccaaatcactccttctgactctttcctaggcaattgtctctaccgctcctggtgtcaagtttaccgtcgcgacccaaatgtgcgattgcccttcaacgaagctctttttctagaatgcattgctgtcaacgactacgcccagctgagctcaaaaactcaagccactattgtagccaatgcatctcgatcagaccctgactggcgacatacttttgtaaaaatcttcgctaagtcacaacacaaagtcaatgatggctccatttttggcccatggaaagcttgccaaactcttgctctcatgcatgattatgtcattctcaccctgggtccggttaagaaatatcaacgactgttcgaccagctggagcgaccttctcacatctactaccatgcagggaacactcctcatgaccttaggcgctggtgctccaaacacttagaaacctctcactgcaccaccaatgattatacagccttcgaccagagccagcacggtgaagccgtcgtgtttgaagtcctgaagatgagacgactttccattccggaaaatctgatatctctgcacgtccatctcaaaaccaacgtggaaacccagttcggacctctcacttgcatgcgactcactggcgagcccggcacctatgacgacaacactgactacaacttggctgttctcaatctccagtacgaccttcgcaaaacaccgacccttgtctcaggcgatgactcctacttatccggaaccctttccccaagatccaactggcctttcgtcaaagagctcctccacctccgcttaaaaccgagcagtctgatcgacggcctcttctgcggttactacttaggaccccaaggctgcatccgcaatccacttgcccttttcgctaaactcatgatagccgaagacgatggctccgcctttgacaaacttccttcctacctcaccgagttctcgattggacatggtcttggagattctctctggcagcttctcccttctgatcttgtgctctatcagagtgcgtgtttcgattacttctgccgcaaagccacacgctctcagaaaatcctactgcaaccaggccttgtagatcaggaaactttagacaagattgctttatcggccaagttcatatctcgtcctttctactcaatgctttcaagccatgctcgcagcctgattagtactaaattcaaactcgactcttccctcaccactctccaagatcccatggttgagtttgaattgcttcccttttccaatgtacaatgacttcctctcgatccactgaactcatcgagactcaagaagacgttgttcgtaaactctcccagaaaactccagtttccaacttctcagctcttccacttccaaatggacctcaagccccaactcagctccagccgttccagttcgaattccctctcccggctggccaagaaggttctgtcaccctgcctctcgccaccttccccaaaatggcaaccttcctttcccgacaccgtcgagcccaactcactcaacttcacgctgtcgtctctcccagtgctgtatccattgggcaccccctcaccgtccaactcatctgggtccccgccagctcaacaaccacttcctcccaaatactgggcacttacggcggtcaacaaatctcggtcggtggtcaggtaaccaactcctctccagctaaagtctctgctaacctcctcatgatgaacccacacatcaaagactctacaagctacaccgacacccccaaactcctcgtctacagcacccccgctgtgccagacgacaaactcacaaccagctcagcctccatcattgtctttggtgaagttctgctcagctcccctcaactcaatccttcagcttaagcaatagcgaccttaagcttctttctccagcgtgtcaccacgtttcgctcctgaatgtccccaggtaaagggacacccca

SEQ ID NO: 576 - DNA, 6532 bp, Bombyx mori latent virus
  source 1..6532: mol_type = other DNA
tactgggatatataaacgatcaacaaagtcagcttgtcactggcttctgcgcttagcatggctttcaccaatttagtcgatactctcgccaacaccatccaccgagacgccataacggctcccctagtggaaaccgccatcagcaatttccgtcacaagcttcaactttacccatatcaggtaaattccaagctaatcccattgctcaatcaactcggcataggagtcacctcctatggcacttcacctcatcctcatgccgctcataaggccatagaaactcacctcctgtttgaacattggaatcatcttgccagagttccttctacggtaatgtatatgaaacctgagaaattccaaaaacttcagcaattaaacccaaactttgcttccctcattaacttcaggcacaccccaaaggacatcactcggtaccccgttagcaaccctcatcctgtagaaactgaagtagcgttcatgcacgacgctctcatgttcattaccccttcccaaattttaggccttttcaaggactccccttccatgacctcactctattgttctctcatagtccctgccgaagccgcttatggagtgccttcactcttccctgatctctacagctacacaatcaaagatgatcagctggtgtacactctcgaaggaaatgctaccggcaactacactcaacctctccgttctttggattggctccgccgctcaggtatttcatcaggcgaccttcatctatctgtcactttacttgaatccttcgtttccgtccattcccttctaatcactcgagttcctcaacctcccccttccggcgaacatgtatttctaactcctcccgcttccctgcttcctaatccggaaggattggaactgccgatcaaatcacgactcgtgccaactgaagtgtacaattctctgtttacttatgttcgagccgttcgcacgcttcgcgtcactgatccttccggattcgttaggacgcaacgtcaaaaaccagaacattcatgggtacaatcttcagcctgggataatctcgctaactttgccctattgacgtgctcggcccgcccttccttagagtacggtttctgctatagctcatacaagcttttatcactctggatcgtgcgtacattgcgttcgatatcagcttatcacaccggttctcttctcaccatcccaattcttcaccatctttccccttatcagctgtgttatcgaactcatacctttagatggctgcccactcatttggacttccacaaaaccttgccctctttgattcacagagccttcgctagcattactggccgctacatcaccaactccccagagttccccacttcaaccttttctattaatcatttattacaacctttcggcaagtcattgcaaaaattcccttgccattccttagtcattcggccaaatcctgcctccttcattgttcgctgttccactcttctacaacgaaggtggctcttgcttggtttatctgccctcactggcgtttgggcctattaccatctccgccgtggcaactcacctcaggaaaagtccgatgcttatctctcttatttccacccggatccctggagactcaccattcgaacatctaacgtgatggcgattcctcattctttcttccccgattcaggctactcgacttcttcaccgtctagacctccatcccctcacccaattgttatcgaacaaccctcgtctaacgtctcaaaacatcatcaggttcaaaaccaagcgtaccttacaccggctcatcctgagacacccccaagccccagtaaacaagagataaaatccggtgagactcttgccaccggctttccaaatgttgcgacactaagcggcccctcggaagcctcgaaaccagacgcccctcctactcctttaagttccgatccaacagctcatgggcccatcctccctcataaagaactttttggcatttcatctcccgatcacgagtgcacctttttaaatcgcaagcgactcaatgtgtcaatgcttcctttccctgctcagccctgtcttcttgttgcttttgctcaagcctcaaattctacccctcagcgagtatgggctcacctttgcacccttttccctgattcccttcttgatggtcccttagaacgctctcaaggcttcagctcagaacacctcgaagctctcgcctggagtttgaattatcgcgtctcttatcgccatggcgaacatctcaacaccataggccccgatgacgcaccactgctcagccttatttacactggtgatggatccataggtcattgggctgccgacgaatcccctctctccccccccccttcccctattcgaggctcggcaaaaaccctcaattcatttgcttcaacagctattcggtttagagactctcacggcaatctcctaccatttcgacaagttcatgagtacaagctctgtaagcccagggcaaaaatttggcctcaacatgaaaatgagactgatggagttatacaatccagcctccgagcggcatcatcagaccccacttttttccatcgccttgatcaaagagccgacttcgccccacaagtttccgtgcagctcattcacattactggatttcctggttgtgggaaaactttccctgtcactcagctcctcaaaaccaaagcatttaaaggccagtacagagtcgctgtccccaccaccgagttgcgttccgaatggaaagaccacatgaaactcccttccagcgacgcttggcgagtctcaacctgggaaacctctctcatgaaatcagcacccgtcttggttatcgacgaagtgtacaaaatgcctcgaggcttcctggatctagctcttgtagctgatccagccctccaatttgtcatccttctcggagacccatgccaaaccgtctattcttccgtcaatccggactcttctaattatcgtctgatttccgaagtcgaacatctcaaaccgtatcgtgatttttactgtcactggacccaccgacttcctcttcgcctagctcgattcttcggcgtttcgactacgaaccctcaagaaggttttatcggacgtcgagacaacccacacaaatcttatcccatattaacatcaagtcagcagacggcgcgagtctgtgccggtacaggccatcgagcgctcactttttgctcctctcaaggttcaactttccaggctcctgcccaaatcttcgtcgactccaatgtggcttctgtccacgtttctgctactctcgtcgccacaactcgttcccgttctggagtcatttttacgggtaaccatcgattgttccaatcaaggcctggtacggcgccactctttgaggctatgctcaatgaccaacccttcaacttcctcaacacatttgctaatgaacttggaggcatggaactcattacatcaccgatcaaagaacgaaagaccattcttcgtggcgggtcttatgacttttcagcctaccgaagctaccaaaaaagacatcaccggatgaccaactttaaattcgatccagctcataccagggctcctcgctctacatctgccaaaccactacctgctaatgacacctctgacataataattttcgcacctgaactttttgacctccagtcctcagccatcccgagacttgacactcatcatcttccagaaacccgtcgtcctctccatttcgatattccttcttctctccctaccaaagtggacattagtagtgctgaacctacagacaccgccatagaacctgtttatcccggctgcgactacaaaactgtggcagctctaatgatggaaccccgggaccccgactcccttgaaatccgccacaagggggagttctccaatcaatttccatgggtcgatctcccttatgagaatggcgcccaaaccctcagcgttatagcacccaaacatgactcgaaatatgacccgactttactttcggcctccattgccaaaagactccgtttccgaccctccttccttccttacagactttctccttctgacgaagtccttggcacatttctgttttcatctctatgtcgagcctataaacgacatcccaatcataaagttccttttcagcccgaccttttcgttgaatgtatcaatctcaatgagtactcacagctttccaacaagactcaagctgtcatccaagcgaacgcaaatcgttcggatcccgactggcggtacactgctgtccgcatattttcaaaaactcagcataaaatcaacgaaggctcaattttcggcccttggaaagcatgccagacattagccttgatgcatgatgccattgtcttaatttttggcccgatcaagaaatatcagcgagttttcgacagtaaagatcgtcctcccaacttgtttgtgtatggaggccaaactccatacgatctctctcggtttgcttcgtcccatctgaaaccattacaaattcatgtctgcaatgactactctgcgtttgaccaatctcagcatggtgaggccgttgttttggaacggaagaaaatggagcggctttccattccatctcatcttatagacctccattgctacatcaaaaccaacattacaagtcaatttggacctttgacctgcatgcgccttaccggcgagcccggcacttatgacgacaacacggattacaatattgccgtcatttacagcgagtacgacatcaccactcaaactgtctttgtctcaggtgatgattctttagtatcacctccacctcctgctcaccccgattgggacgccgtttctccactcctttctctcacattcaaaaaagagtttgtcagaaacggtctcttctgcggctattacttgggaccggccggagccattcgtgctccccgtgccctactggctaaacttgtgttagccctagacgaccgaacccttcctgacaaaatagcgtcttacctcagtgagtttgttgtaggccactctctcggcgacgctttctggactctcttgccagcagatcaagtgatttaccagagcgcgctttttgatttcttttgccgtgaatgttccaaggaacaaaaactcgccctcaaaataggagaagtgcccgaacatctttgtcagacaatgctttccctcggtttctcctggttatcacgccccctttatgctcttctggataggaccgcccgcctacgtttattagctcgcactcgtttcgcccccctcttttccgatccttctgtagagggtgttttgcaactggatttctgatgacctattcatggaagaaattgtgcctttagtcgtttctgccgcttcggccattccgtccttggtcaatgctttctcttcttccaaaccccctcaaactgataacccgtctgcgcgttccatggatatgcaacctttgcctagctctgacagcgttgttctgtctagccaaccgcttccgccggctcctccgcccccgctcggatcttccctgggacggtctcctcaacgtttgatcatcccttttcaacgcctgtacttcgatcttactggcaccgaaaccaaatcgaacagtgtcactgtgcaatcactaccgaacgtctcctccatcatcaaaggctaccgcgacgcgtatcttgtcaatcttgaagctgtcgtttttccttccgcccctagcctcaaaataccagtcacagttgacctttgttggactactgctgacgtcacagttgaaggattcaatgtgctggccaccccttcatccgctcgcattactatgggcggtctcgcccttatgcatcaagctaccctcccctgcgatctcggctacatcaacccgatcatcaaatccccgattccatacaccaaccaccccagacttaacatccatttccatcaatccgctgacgccgtactagaaggagttcgcgccggggttaaagcctccgttgtcatcagaggctccatcagcgtatctcaccccctcgtcactgggcatggctaaaggggtttcgctcccttattttcaagtgaatgatgaatcacaagcttcgcgccttattagtcgtcattccacgcatactccgctcccctcctccaactcaccccctcatcgaagacgtcgtcatggccacaaaccaagccatcatcgactataaagtcaaaatcgccgataataatttagtaactcataaggaactggccctcaaggtttcttctatcataggcacccgagtctacgtcttcgatccctcttgctacttttcaactcctcccttcgataccgtattgtacgacaacatcaggacggttcgtaaggacaacaaaactgctcttctctctgcatctattcaagcttctctcccttcctccgagatctaccgccagttggtagatcctcgccatgtttcttccgactcctttggagtctacgtaaaatcttaatcccttattcttcacagttttgggttgttagtttcatcgcgctctaacaaaaaaaaaaaaaaaaaaa

SEQ ID NO: 577 - DNA, 81 bp, Vanilla latent virus
  source 1..81: mol_type = other DNA
ggaaaacaaaccaaaccaaatctcactcaaacaaacacaagccaatcaccatcgtctgtgataaggaaactcagcaaagcc

SEQ ID NO: 578 - DNA, 97 bp, Wineberry latent virus
  source 1..97: mol_type = other DNA
gaaaactccaccacacaacacgaacgcacacggcacgaccctagtttgacctctgtgataaggaaactcagcaaagccctgaacacagcagcatact

SEQ ID NO: 579 - DNA, 59 bp, Ambrosia asymptomatic virus 1
  source 1..59: mol_type = other DNA
catacactcacagaccttcattttcagcagcttcgaacacacaagtagatactgctacc

SEQ ID NO: 580 - DNA, 205 bp, Cassava Colombian symptomless virus
  source 1..205: mol_type = other DNA
gtcattggaaccatctctgtacaacattaactataattttaatggttttcagtacttaccgggctcacatggtgggggttcataccaccatgaattcaaagacttggaatggctcaaagtaggttacattaccgagaaacacaaagaaggcgatgtttggcagcctcgtgaaaataatcagaaatacactactataacctgccag

SEQ ID NO: 581 - DNA, 87 bp, Aconitum latent virus
  source 1..87: mol_type = other DNA
cgaaaaactgaacatacaatatcctgacatacacagaagtacactactataccctgaaattagtactacactactgtctacgtcact

SEQ ID NO: 582 - DNA, 81 bp, American hop latent virus
  source 1..81: mol_type = other DNA
ggcgctcgggataaacaaccatacaccaacaattcccggacatcttaagaaataccataacgctctttcttaacacgtcaa

SEQ ID NO: 583 - DNA, 63 bp, Gaillardia latent virus
  source 1..63: mol_type = other DNA
ggataaacaaacaacatttctttagcatactttattgtatcacagcatccaataccgtacgca

SEQ ID NO: 584 - DNA, 80 bp, Garlic common latent virus
  source 1..80: mol_type = other DNA
acctcttccaatgggctgcggtatgttagtaccatagacaatattagataatctaaacagatcatcgaaatatcgtacct

SEQ ID NO: 585 - DNA, 72 bp, Hippeastrum latent virus
  source 1..72: mol_type = other DNA
ggataaacatacaatactttattataacctcaaatatatagccttacacggaaatacatttgagttataatc

SEQ ID NO: 586 - DNA, 74 bp, Hop latent virus
  source 1..74: mol_type = other DNA
ggataaacaaacatacaatatctagacatactctgaacgatactcacaagcactaccgatcagactacgtcatc

SEQ ID NO: 587 - DNA, 59 bp, Kalanchoe latent virus
  source 1..59: mol_type = other DNA
gataaacactcccgaaaataactgcttataaattaccatataattcatagcagttactt

SEQ ID NO: 588 - DNA, 77 bp, Narcissus common latent virus
  source 1..77: mol_type = other DNA
ggataaacaaacatacaatttccaaacatattctgagttatactacccgaccgtaccacaactcagactacgttgca

SEQ ID NO: 589 - DNA, 104 bp, Nerine latent virus
  source 1..104: mol_type = other DNA
cggcatttaccttagtccttacagtggcatgccacattcacaccgcggataaacataacatctcaaagtattctcaagttaatcttagatcaaattgagaacac

SEQ ID NO: 590 - DNA, 71 bp, Passiflora latent virus
  source 1..71: mol_type = other DNA
ggccattacggccgggataaacactcccgaaaataactgattataaacgtaccgttcataacagttacttg

SEQ ID NO: 591 - DNA, 64 bp, Pea streak virus
  source 1..64: mol_type = other DNA
ataaacaaccaacaccccctcaatctttttaaaataatcctaagatcattttaaaaacatctaa

SEQ ID NO: 592 - DNA, 61 bp, Shallot latent virus
  source 1..61: mol_type = other DNA
ggataaacaacactactcaaaacaagacgccactattctaacaaaacagagacgtctcgta

SEQ ID NO: 593 - DNA, 96 bp, Shallot latent virus
  source 1..96: mol_type = other DNA
aatctaaagctcaaccccacggagcagtccagggaggataaacaacactactcaaaacaagacgccactattctaacaaaacagagacgtctcgta

SEQ ID NO: 594 - DNA, 73 bp, Yam latent virus
  source 1..73: mol_type = other DNA
tggataaacaaacatacaatattcatacatactcgaacatactctactcgctacagctgttcgactacgtacc

SEQ ID NO: 595 - DNA, 65 bp, Actinidia seed borne latent virus
  source 1..65: mol_type = other DNA
gaaaacaaaacgaattccgcgacatcaaattgtactcaactaggattacctgcaacagattgcta

SEQ ID NO: 596 - DNA, 84 bp, Actinidia seed-borne latent like virus
  source 1..84: mol_type = other DNA
gaagcatcacaatttatgtgaaaacaaaacgaattccgcaacattaaattgcactcaactaggattacctgcaacagattgctc

SEQ ID NO: 597 - DNA, 30 bp, Zhejiang betaflexivirus 1
  source 1..30: mol_type = other DNA
aacgatttaaaacaataaaatcattctgca

SEQ ID NO: 598 - DNA, 61 bp, Zhejiang betaflexivirus 2
  source 1..61: mol_type = other DNA
caacaatatccagcaatattcaaaagtaacagtcaatactctcacttttgttcactgcatc

SEQ ID NO: 599 - DNA, 185 bp, Olive latent virus 3
  source 1..185: mol_type = other DNA
gcatacaaatacaaatctctctgacctcaccagtttcgagagaattatttgttctacggattccgcttcggcacgaatccaccaattttccttttgcttttctgttcctttagcgccttgacggcagctctaaaccgccaacttcaagctccaattccccgctcactcaatctccatcttgcgac

SEQ ID NO: 600 - DNA, 139 bp, Andean potato latent virus
  source 1..139: mol_type = other DNA
gtatttgtacccagaataatcctttgctagtcaaacattattcttttcttttctgtaaaatttctgcacacttacacgcctcctcaggacccgtgtttgtaccctgtaacctcttgtgtcttcttcggaccacacttga

SEQ ID NO: 601 - DNA, 72 bp, Asclepias asymptomatic virus
  source 1..72: mol_type = other DNA
ggtaatctttaccgaacagtcctctgatcacagacagctgttctttaatttaattgtcaaatacgtctgcca

SEQ ID NO: 602 - DNA, 96 bp, Erysimum latent virus
  source 1..96: mol_type = other DNA
ggaaaattatttcaatcagaaaactctcttcatagacttgttttcttccttcccaccccctctaaacctctcttatccaagatctcgtttagattt

SEQ ID NO: 603 - DNA, 57 bp, Bombyx mori latent virus
  source 1..57: mol_type = other DNA
tactgggatatataaacgatcaacaaagtcagcttgtcactggcttctgcgcttagc

SEQ ID NO: 604 - DNA, 133 bp, Apricot latent virus
  source 1..133: mol_type = other DNA
ggtcgtgcgtcttgctttcagtttctccagtatttatgcttttaaataaagttgatcccaacctaatcgggacggcagagtgtgttttatttcaatttcctactttgcttatttttgttttaactagattttc

SEQ ID NO: 605 - DNA, 114 bp, Vanilla latent virus
  source 1..114: mol_type = other DNA
taataatagcgccttgcgcccagactcgttgtttcgcgatttgttggagtttgcgtatttcaaatcgcttctgttggttaacttaataacttaggaattgtgtctaagggacac

SEQ ID NO: 606 - DNA, 108 bp, Wineberry latent virus
  source 1..108: mol_type = other DNA
gccaaccggccgccccattgttttcgcgattttgttaggggttcaaatcttcaaaatcgcttccgcaacttaattcggtaatttgtttcagggttctacgtaaccccc

SEQ ID NO: 607 - DNA, 66 bp, Ambrosia asymptomatic virus 1
  source 1..66: mol_type = other DNA
tgccgcggtagtttgtgcttttagccgcgtgaacttcctttgcactgacgtaattagctaacaacg

SEQ ID NO: 608 - DNA, 65 bp, Ambrosia asymptomatic virus 1
  source 1..65: mol_type = other DNA
cgccaataagaaggccacaagggaggagttagagagacaattagccgaagcccagtatacgagct

SEQ ID NO: 609 - DNA, 347 bp, Cassava Colombian symptomless virus
  source 1..347: mol_type = other DNA
ccaacgctaactccctcggactgttggataaccgaggataaataatccatgtttagtcctcctagctagggactcttagtcatatagctagcatctgttggtaccgagataaccaacattaaataactcggttttcaggcatgcttcagcgtttgtggtgcctgtcatactaacgctatatattaactaggattagttatatattaatcgccataatggctaggtgaaggaaaacacctccaacgagaagttggtttaaaccgcacgtcgaagctatacgtaaaacttaaacagcgtgcttcataggtccaggaggagacctataaaaaaaaaaaaaaaaaaaaaaa

SEQ ID NO: 610 - DNA, 80 bp, Aconitum latent virus
  source 1..80: mol_type = other DNA
ttgtgagttatcactaaatcctatttaatatataaggtgtgtaactataaaaagaatgaagttttatctatttttccttt

SEQ ID NO: 611 - DNA, 41 bp, American hop latent virus
  source 1..41: mol_type = other DNA
agtgtgctactataaaaataattaagttttaaatattttcc

SEQ ID NO: 612 - DNA, 80 bp, Gaillardia latent virus
  source 1..80: mol_type = other DNA
gcaaagctctgcataaaacctaattaatgtataagtgtgaagctaataataaataaataagttttaatatatttttcctt

SEQ ID NO: 613 - DNA, 104 bp, Garlic common latent virus
  source 1..104: mol_type = other DNA
tagtgtgtcagagccatattggcgactattcagacctattttgaatagcttgactaaggtttaatatatttccttttaaaaaaaaaaaaaaaaaaaaaaaaaaa

SEQ ID NO: 614 - DNA, 68 bp, Hippeastrum latent virus
  source 1..68: mol_type = other DNA
ttgctactaaagcctatttaattgatgtcgtagtaatgtaaaccaatagtttttaaatattttttact

SEQ ID NO: 615 - DNA, 80 bp, Hop latent virus
  source 1..80: mol_type = other DNA
tgtgggggtggccgctaaagcctatttaatatataaggcgtgtcactataataaaactttggtttttaaatattttcacc

SEQ ID NO: 616 - DNA, 74 bp, Kalanchoe latent virus
  source 1..74: mol_type = other DNA
caaagttctacctaaaacctaaaaaatatataagggtgaaactataaaaataatttgtttttaaatattttagc

SEQ ID NO: 617 - DNA, 47 bp, Lily symptomless virus
  source 1..47: mol_type = other DNA
tataagggtaaaactataaaaataatttgtttttaaatattttagca

SEQ ID NO: 618 - DNA, 89 bp, Narcissus common latent virus
  source 1..89: mol_type = other DNA
attcactgttgtgagtggtcactaaatcctatttaatatataaggtgtgtcactataaataaagtttggtttttaagctattttttccc

SEQ ID NO: 619 - DNA, 38 bp, Nerine latent virus
  source 1..38: mol_type = other DNA
tgaaaggcttagtttggttttatcgataatttaccaat

SEQ ID NO: 620 - DNA, 53 bp, Passiflora latent virus
  source 1..53: mol_type = other DNA
ataatatataagggtgaaactataaaaataatttgtttttaaaagattttagc

SEQ ID NO: 621 - DNA, 89 bp, Pea streak virus
  source 1..89: mol_type = other DNA
atgtgtgtgcggttgctagtaaaacctaaataatgtataagctagaacctataaaatcaagtgtgttttaaaatatttttaatgcttgt

SEQ ID NO: 622 - DNA, 94 bp, Shallot latent virus
  source 1..94: mol_type = other DNA
aaccttactatgaaccttgaatagttgcccataaaacctaaataatgtataagtgggaacgaaataaaataatttgtttttaaaatattttcgc

SEQ ID NO: 623 - DNA, 96 bp, Shallot latent virus
  source 1..96: mol_type = other DNA
aaccttactatgaaccttgaatagttgcccataaaacctaaataatgtataagtgggaacgaaataaaataatttgtttttaaaatattttcgcaa

SEQ ID NO: 624 - DNA, 63 bp, Yam latent virus
  source 1..63: mol_type = other DNA
atcctatttaatatataacgtgtgctactataaataaaaattggtttttaactatttttggcc

SEQ ID NO: 625 - DNA, 66 bp, Actinidia seed borne latent virus
  source 1..66: mol_type = other DNA
agagtctgcatatgcgtgagtagttataacttaagtaacttgctttggacgtttaaaaatttgacc

SEQ ID NO: 626 - DNA, 61 bp, Fig latent virus 1
  source 1..61: mol_type = other DNA
atgtttaaagttaaataaatggtcttggcaacctaaaaccagacgtgacctggaggcaacc

SEQ ID NO: 627 - DNA, 81 bp, Arracacha latent virus V
  source 1..81: mol_type = other DNA
cgaaagatctaatggtaggccaggataaataaaatttgaggattatagacctcaaaaaaaaaaaaaaaaaaaaaaaaaaaa

SEQ ID NO: 628 - DNA, 116 bp, Actinidia seed-borne latent like virus
  source 1..116: mol_type = other DNA
agagtctgcatatgcattagtagttataacttaagtaacttgctttggacgtttaagaatttgatgaagcaaaacattgcaaccatggtgcttgagagtcctttttatggacaaag

SEQ ID NO: 629 - DNA, 114 bp, Zhejiang betaflexivirus 2
  source 1..114: mol_type = other DNA
ggtgataccccttaaatttaaaactctcgaaccaaggaaagagtataaagagtccttgtgcatcttcagacctaactgttgagatgagaaccggttttaaagttattttcctgg

SEQ ID NO: 630 - DNA, 125 bp, Olive latent virus 3
  source 1..125: mol_type = other DNA
aggaaaacacctcccaccttgagttggtctttatgctaaaccaaagctttctgcaatttaaatcccgaaagttctccattctagcaatagattacgtcgtaagtcggtagcaagacttttcgttt

SEQ ID NO: 631 - DNA, 125 bp, Andean potato latent virus
  source 1..125: mol_type = other DNA
cactcatcccctccatcctgtcggttcaggttaaaaatcatgtaattgaaggcagtccttctccctttagcacacaaaggtcaaatcgggtgcgactcccccccttttccgagggtatcggaaac

SEQ ID NO: 632 - DNA, 99 bp, Asclepias asymptomatic virus
  source 1..99: mol_type = other DNA
gctctcaaggtcacagctcgcgagtgcgaggcctgctaccctcacacagcaggtattggggtgcgactcccccgtctattccggacgtcaccggaacca

SEQ ID NO: 633 - DNA, 80 bp, Erysimum latent virus
  source 1..80: mol_type = other DNA
gcaatagcgaccttaagcttctttctccagcgtgtcaccacgtttcgctcctgaatgtccccaggtaaagggacacccca

SEQ ID NO: 634 - DNA, 507 bp, Bombyx mori latent virus
  source 1..507: mol_type = other DNA
aggggtttcgctcccttattttcaagtgaatgatgaatcacaagcttcgcgccttattagtcgtcattccacgcatactccgctcccctcctccaactcaccccctcatcgaagacgtcgtcatggccacaaaccaagccatcatcgactataaagtcaaaatcgccgataataatttagtaactcataaggaactggccctcaaggtttcttctatcataggcacccgagtctacgtcttcgatccctcttgctacttttcaactcctcccttcgataccgtattgtacgacaacatcaggacggttcgtaaggacaacaaaactgctcttctctctgcatctattcaagcttctctcccttcctccgagatctaccgccagttggtagatcctcgccatgtttcttccgactcctttggagtctacgtaaaatcttaatcccttattcttcacagttttgggttgttagtttcatcgcgctctaacaaaaaaaaaaaaaaaaaaa

SEQ ID NO: 635 - protein, 1423 aa, Vanilla latent virus
MYTTLVMATSVRKLLDQVSDPSTKAAYSELCFKHARDAATKASAIAPFAVSDSEALGLERMGITTSPFATTSHTHAADKIIENDCLSIIGHYLPKNPVTLIQLKRSKLHLLGRGANSDHFANYSYEPKDVLRYGTANPHYCPKVTTEYAVLADTLHFMSPHQLVTLFLKNSKLQMLFATLVLPIEALHKLPSLFPEIYRLEYLKDHFVYMPGGHGGAAYVHSYHTLQWLSTAQIGTHTNNILSIGSTDFITLEKIETKAAHHIMVVQRRRSAIPWPVPPIWVFHASDMVKLPHIFYPAEANVQNAYPNTLIKRMQAYCFSVKAVSLRDIFAKLRQVLETSDLQKYSMPDLVRLANYLLFTTGMQQVSDYDSFLTKGWLARLSSRIQMRIRQMLQNVVGQSSYAALLSVLDTIPMPFITKPRAVPAVGPEWFHEEYTEGKPEHDGPENCSLEDIEMLAELDQTLTPHTQTETKEPQSPNGQITNQNTNSAATSSKRTNSENSSESQRRELFDEEQLIAEMWAEIETVPDLGSSSKIESSIIKTPTENGGEQMPTSDFDSRTTEILRIHGFTALKQQSDGISPIMPVYFNDKTDQLCKSKIQTGCPFMSMATDIKRHFYDYTIDNRRGQAYMSDVKNNLTGLVLPKLSRETLQAWVSLAENSKRTIPLLVIHGAGGAGKSQKLQETLRAIGAATEDVNIILPTVNLLKDWKDKMNQMDTRRFMTFEKAFEREGNRIVIFDDYGKLPAGLIDAYLSIKPTVSMVILTGDQRQSTYHSANKESQSAQLPTNIAHFRKYCDYYINATHRQPKRLANPIRVHAQRLHGGSVKKENLIKNGQTVLVPAHRTQISLTDLGRPSLTYSGCQGLTLPHITIALDSDTPLCSDEVLYTAFSRASESITFVNTYSENPDFLAKLDATPYLKTLLSGVREDEEAGSDLKPAEPEVREPQIKTHLPVTNTDTFLESKVEKTEDKDTRELWDGSEKTNLAQTQDPVIQMFPHQQAKDEALFKLTIQQRIKTASPEENRKELSQTINVGNLLFEAYADFMKVPKEPQPFDKALWINCLQTAQRTYLSKPTANLQQGANRQDPDFPDNAIALFNKSQWVKKMEKVGFKFKAGQTISAFKQQTVLITTTMALYLRRQRERHQPGNIFIMCEKTPDQFNDFVMNNWNFDRPSYTSDYSQYDQSQNGPFLNFELRKARHFGVPDEVLEFYQHVKCYAQTFVGNLAIMRLSGEGPTFDANTECNIAYDALRFQLNDQVNACYAGDDLVRDQVCPERSCWKYCHEKFNLVAKPLATNKPDFCGYRLTKYGIVKSPIQLYQSLELAIRLGKTEEVKRSYAIDYLQAYRLGDKLFEIFDEKEMEAHQLTTRVLTKKGMKAPSEGDHMPSFHITSDRLIRNPHYAEMQDTQSHRIYTEKPNFVENHFT

SEQ ID NO: 636 - protein, 1513 aa, Wineberry latent virus
MATQVRRLLDQVSDPSTKAAYSELCFSRAKDAAAKAATLAPFAVSDAEAVTLERLGITTSPFATTSHTHAADKILENDCLALIGHYLPKDPVTFIQLKRSKLHLLHRGPDQDVLTNYCHEPKDVLRYGITNPHSCPRIQTQYAVLADTLHFMSTMQLAVLFNKNPTLDRLFATLVLPIEALHKLPSLFPEVYRLEYYENHFAYMPGGHGGGAYVHSYATLKWLSTGQVGTHGPGLISFGITDYLSLEKIETKAAHHVMLIQRRRAKVPWPLPPVWVFQASDYVRLPHIFYPPEANVRNTYQDVFVKRLQAYCFSVKAVSLRDIFAKIRQVVETQELRRYSMADLIRLANFLLFTTAMQQVCDYQSFLTKGFLARLSARIQARIRSLTEGFMGQSSYAALLSVADTIPVPFTTKPISRPAQGEDWYRNPEEQDEGPEEEDHPASPSLEDLDLLAELWENPPHNAVARENPDKATSPTPTTHKEEPAAEKEPNRGKRPLLEHLPDTRDAPDITLDELEAMLEDCPAKPKPGTIVGHHMSDRVYIPHGEGPSATTPPIQPSTCSTGQTISDHIQFGTVGEDDLPEDTTTSHLSTTQIEPPTPVQSHQKRCPDSPSEHKPTLTSGLRNQGQEKAASRLPVRTIEILKLHGFTNFNQQHSDVGPIDPVIYNPNAHNLQLAPPPLSKLNRVLDAMAGRLQRHFYTYTLDNKRATAYMSDVKNNLTGLVLPKLDRNTLSAWVSLAECSKRTVSVLVIHGAGGAGKSRAIQEMLRNHGDVADKTNVVVPTVNLVLDWKAKLPGVDPKRFMTFEKACEREGKEVAIFDDYGKLPAGYIDAYLSIKPTVETIILTGDQRQSVHHATNREAQTANLKTNVQHFSKYCDYYVNATHRQPQRLANPIQVHAERKVGGAVHRANLIPDTATVLVPSFTTQQSLNGLGRKALTYSGCQGLTLPHVTVVLDNDTPLCSNEVLYTAFSRASESITFVNTHSDHPDFLAKLDATPYLKTLLSGVREDEQAGKDDPLPKPEVREPMIKTHLPVANLETYLEDKVEQVEDKDTRELWDGREKTNLMQTQDPVVQLFPHQQAKDEALFKLTIEQRIRTASPAENVKAVQHTLQAGDLLFEAYSDFMHVPKEQQAFNPDLWEHCKQLALRTYVSKPRNNLEQGKTRQDPDFPENAIALFNKSQWVKKLEKVGFKFKAGQTISAFKQSTVLLTTTMALYLRKKRLEHQPQNVFIMCEKTPADFNDFVLNRWDFKTPSYTSDYTQYDQSQDAAFLNFELRKARHLGVPDEVLDFYKFIKIHARTFVGNLAIMRLSGEGPTFDANTECNIAYDALRFKLSPNVNACYAGDDLVRDQVCDERPGWQLSKHLFTLQATPLTTTTPDFCGWRLTPHGIVKSPIQLYQSLQLALRLNKMEEVKRSYAIDYSYAYKLGDKLHEVFNEQELDAHQLTTRIFVKKGLKIPETGDHLPQFNVVSDRLITNPHYKEMHDSTSDRILLSEFEIQEDYVPDYIPRIIQN

SEQ ID NO: 637 - protein, 1592 aa, Ambrosia asymptomatic virus 1
MSQVRATLDSLNDITVRSNIQQTYAEGIKREFKAAARISHYNMPIEAATKLESFGIITNPYSIALHSHAAAKVCENKLLDTVGHILPKERVTFLFMKPAKRNMLRRSPHLDDYFINQHLEPRDISRYGYESSYDVIPAIPTRVAYMSDTLHFLDVNYVANMFRNSPALDILYATMVLPVEAKFKHPSIHPEIYSINYSHGGFQYIPGNHAGGAYHHEFKQLDWLSVGRIKWKELTDWEEQHCITVQMLEVLGANILYVFKRGNLLTPAVRTFQVDQYVVLPRVFHPQEMNSSRPIKHTLAMQLLLYIKTIGTPTSKDVYGKIRQLVKTSELNYLDPTELIHLTNYYYFISKLNSITCYEDILSKNILSGVLLPAKQWLISTWEKVKGKQPFNQLLQALQWETFTYSLKVEDVETTLQAPDGNYAKRERMPLFNDGGFKTFEVLSEDESDTSSSSGESIVVEEAPEGTPVDSTPTRAGVLKCGCGMDFEVYDESITRLDLLNRIETPDQLRGRTAGFYSKSMEPYEYTGAKHESLGWPQWLEDFVTTNSINSAMDHCLIQIYDEGAGIPFHKDDEKCYPKDNPILTVNLTGTAEFKIRPAKRWNRTCTHLEHKLGPDSALVMPAGAQKSHQHSVVRCSAGRTSLTFRSTSPIETVWENKLPDQVEVDVPIYTSEAGDPPTDITNAGPAQNKPDEVAQQPPVPPQPEHQISSDDKTDRSRRGDHRDSNQGAKGKEPINEPSDAGPSHTKQEHEQSDDQDQVDDLRWKHWLPILNRCGFKGTELQHDPEGNLISPIEHHHKLEKRPFPPECPKALANSLTEMNRQPVLVSLDHRRATCVSADVKYGKFGKLLADQDRAWKEKFHYNTQQNKRTKEVVVIHGAGGSGKSKVIQDFLKTVSVEESYKYTIILPTNELRQDWLTKVRNLEEKSFKTFEKAMLQPCGDIVIFDDYGKMPPGYIEAFAAQQMNGVLYILTGDSRQSVYHESNCDAAIAQLSSNVEEFEQHCRYYLNATHRNRRDLANKLGVYSERDGTTTITHGSTILPGAPVLAPSLMKKSLLGDGGHRSMTYAGCQGLTAPKVQILLDNNTPLCSDKVMYTALSRAIEHVHFINSGASSSGFWDKMGTTPYLKTFLRLEREEKLREEEPPEAPEPAEPVVRTHLPVDDAAGIFEDLMAKQGEKYEREIYSQAHGHSNCIQTQDQFTQIFQHQQAKDETLYWATIEKRIAISSEYENEKEFRLKADIGDVLFDNYKRAMCLPDDPIPFSEELWNGCAREVQNTYLSKAVHLIKNGEDRQSPDMDLAHIKLFLKSQWVTKMEKAAAQVKPGQTIAAFAQSTVMLYGTMARYMRRIRESFQPPNIMINCEKRLEDLSEFVKTRWRFDKVASSNDYTAFDQSQDGSMLQFEVLKAKHCGVPPEIIEGYIQIKTRAHIFLGVLNIMRLSGEGPTFDANTECSIAYVHTKYHVPAGCNQLYAGDDSAMDDVLEEKPSFANIRAQMKLEEKLQVHAQVKGYFAGFCGNLITPHGLVKDPVKLLAGWKLKKSRGALGTVVDSYTLDARHAYQLGDRVHDIFTEDEMSCHQNLIREIHKVGKGHLLL

SEQ ID NO: 638 - protein, 172 aa, Ambrosia asymptomatic virus 1
IKTRAHIFLGVLNIMRLSGEGPTFDANTECSIAYVHTKYHVPAGCNQLYAGDDSAMDDVLEEKPSFANIRAQMKLEEKLQVHAQVKGYFAGFCGNLITPHGLVKDPVKLLAGWKLKKSRGALGTVVDSYTLDARHAYQLGDRVHDIFTEDEMSCHQNLIREIHKVGKGHLLL

SEQ ID NO: 639 - protein, 1066 aa, Cassava Colombian symptomless virus; identical to SEQ ID NO: 474

SEQ ID NO: 640 - protein, 1986 aa, Aconitum latent virus
MALTYRTPMEDIVISFEPQTQAVIAQSAAVIYQKLEESNCRYFNYYLTAIAKRKLSCAGIYLSPYSAAVHSHPVCKTLENYILYDVLPHYVNSSYFFVGIKDRKLKLLKSRDRRLEGVQLINRVVTCADKLRYSNELVQYNSLPHEGLEGHRIALEGDTLKRLVGPLLRHKAKHLFLHDELHYWSSDELCTFLEVMQPETMLATLVYPPELLFKQTKSLNEWCYTFEIIRNTFFFYPDGIRSEGYQQPLNGGYLLSTNSIKLQDGTVYGVDILSSKFAHHLVALTRGKAVTSTHRSFGPFEASTASGLSRICPSYPICLPIPCEVISKIYRYLRTLKKPDVQSANAKLSQIVAEPTGREITFVEEFAKFVIKTDSICTTFSFDEMEKFFRAVLGKLPAVFARQFASVRELGLHEFIEGLEPFNFTTKLNVLNQGDIWQNLYKWLEDGSDCEDLPGLCDGTFMFGVKSGLRDRRAQPYHGTIALSVQSCGALLVIPKDKLRNHLIGLYMRERCDGLTRKVSHSAVLAYCTERLAHSILLPKVRRRGCSTTRLSTLEILGVCELTPLIRRIIRYVNCKSRTTFGESGIEWFLLHKTFRARTLFLNSVPDAKRVVNPIAALWGMVVSEVVSSGCRWSHKTEEFCEPAPTRASFIMPPLKVNSVACAKDQLASTSSQMVAYSKVDDDELHIPFICKCGMSMPITDLVLPEHPFDSPDTLRNRRAGWYSRGNISYSYNGGSHQSLGWSNYITTWCEVNGVEGKYDCCLYQVYEAEAAIGFHADDETIFEPGESVLTINLEGRASFGISCAKGDSFRVLNGPLQFTMPMGFQADHKHCVRGCTAGRASLTFRCLKRTQLPQAIEVSATKQSQSGDDSEESDDQKGADYSCPGVKYSEKGLPKDSNYTTGESCPGPNSFWRSLSALTRYNLSEVKRLSLMHIFGDARCDQAIKLYQSTGTILGDSCIAAAAIRLGATITIWNMELELQQIYAPESPRMALHLEYTAGMYKPIFLKNGCVIVAVAEAIGRTNAEVQQVLNDCCCDGLLKEIWRGEGLQRNDMELVFKAFDIEAYVTENDDTRVYNASGTLRKNFKLVNSHLSYESRAKDPCSTLLAGLVDSKCFPVEVLDSLRSKGFTRKYVIDSVRAGMLADTFHKAQTGVLQSELFNKKTNLREHFRESHEVDVTVIVGIFGSGKSHIFKMMLDQARGKVFDFVSPRRALADAFTKLAGVKRGRRDRIKLGQENWRINTFEKFLDRTQFLHEGQVVILDEFQLYPPGYLDLIMSLIKVDVHLFLVGDPAQSDYDCEKDRLALQSLPDVASTVLLNVTYPYNGLSLRFQNRNFLGRLPCNLDESTVTMDEPHELRAGLDVLERLEEHYSALVLVSSFDEKTIVLSYLPKAQVLTFGESTGLTFDYGTILISGISERANERRWYTALSRFRKNICLVNCTSSSYENLVVSYRKRALGKFLSQTANLDDLRVVLPGNPEFRNGFTERTGKDEGVREDKMVGDPWLKTMINLYQGAEMQDEEIAEAIIQESWFKTHIPREELECVRARWVHKILAKEDREVRMGHMISEQFTDDYSKQAGGIRLTNAAERFETIYPRHRANDSVTFIMAVKKRLSFSNPARERAKLFNAQAFGRPLLKEFLKRVPLRPAHNHEFMARALWDFEEKKLGKSAATIENHSGRSCRDWPADVAQIFSKSQLCTKFDNRFRVAKAAQSIVCFQHAVLCRFAPYMRYIEMKVHEALPKNYYIHSGKGLGELNDWVKRGKFQGVCTESDYEAFDASQDEYIMAFELELMRYLRIPGDLIEDYKYIKTSLGSKLGNFAIMRFSGEASTFLFNTLANMLFTFMRYEIKGNEFICFAGDDMCAPTHLQTTGRHKSFLDKLKLKAKVQFTGKPTFCGWHLCPDGIYKKPQLVLERMCIARELNNLANCIDNYAIEVAFAYQLGEKALNRMDEEEVGAFYNCVRIIVRNRHLLKSDVRFIFERGLGD

SEQ ID NO: 641 - protein, 1977 aa, American hop latent virus
MALTYRGPIEEIVGCFEPAVQSAIASTAANGYKTLEEENFHAFNLALSAIAKEKLSKAGIYLSPYSGVPHSHPVCKTLENYMLFSVLPSIIDNRFTFVGIKNFKLDFLKARVEKKGKRNVNLIESINRYVTSADKIRYGNDFVIASSKPCKMLKRHAPLLGKAALRELIPECVQRRAKHLFMHDEIHYWDARDLCGFLEVVRPETLLATLVYPPELLSGAKESLNRWCYTFEIKDSNLLFYPDGVRSEGYVQPLRNGFLLKANRIVLADGTVYGVGLICSKFAHHLVAITKGSELNVDYRSFGPFEAVACNGLSKMARKVNGCFPVSFDLVSRVYRYLRTLKKPDVQSAMAKLGQLVPEPNGAEIKFVEEFSKLVIRTNTINSTICADHAKLFLGNMLGCLPGIFLQTFGVAREVNLDSFVAALEPYTFTLKMTTIDDNYKEVIDFLNFGECEEGYDLVSAMDSKLYGPRIGVLNRTQQPYVGLAPVRDEKKVLLQFTKEQALRALVFILHKSFNDSYQIGISKPLLKRWLREVRSKQRNLWCKHIDELLVDEAELTRVCKRVLAKGIPKNRPYMPKRLEAVPTRCAVPREAKLAYSCVVSDILRRGAKWGAEELAKKLKIETPLVTESAHNIPPPEPVEAEVVHEPLVCGCNEDLSYRTLPHAGLIHEYFPDKLRNREAAWYAKNGTCYRYSDITHQCLGWPNWIEKWAEVNDLDISGYDCLLAQRYREGGAIGFHADDECIFETGGSILTVNIKGRALFSLAGNVCRKVWELNDGECFTMPCGFQQTHKHAVSGCSEGRISFTFRKLKTTCVTDKPAPETPQDNASDDGANGSQSIEKPVLDADTQMSDSSDSGGELDSVASNREPSLTYEVGCVEFTWQPAELSCNNFKFVKVNGDGNCFWYTLEHFTGVNQRRIKEAARTGASYDSEFSVRLAEQLQDRVMAEEEAISAASYALRARLVIYDFEKQCIVSVGNEVFKQTYFIGLSNEHFSPVLPVNDCLAVAIAAHLDRKVEDVINVLSKQMDEASFMDLWCGKGVDVSFLPLIFEMFNIEALVTGKGEDILINAGAEFKGVYDIVEEHITYLPERKVPHHQVLNTNVGTKGVNKGSLQLLRGSGTMLDYAPEMSRALRLAKNLFQGRTGAISSGLFNDKASLEPDVHNGDFSSRAVCVVLGTFGAGKSTLFKKFMQANKGKCVHYVSPRRGLADDFASAMGIERGPRKKLNVASQNWRVNTFEKFIAVIKSIGSGAAVIIDEIQLYPPGYLDICLALLERDVHIFLVGDPCQSDYDSEKDRASYAFELSDIEMVLKEREYRYNIMSRRFQNANLVGRLPCYIDQERIKIDESYLIYDRVEDLADLPDEYRDVILVSSFDEKKIVESYTPDAKQILTFGESTGRNFRCGCILVTEASKYTSEKRWITALSRFSRNVAFVNATSTSFEQLLLVYKGKVLADFLCKRSTEEFFTQILPGKPVFRKGFSNAVGKDEGIMEEKLQGDPWLKTMIDLLQIEDIEETLIDQEEMQKEWFKTHLPQCELESVRARWVHKILAKEHREKRIGCMISEQFTEEHSKEQGVRLTNACERFETIYPRHRANDTVTFLMAVKKRLRFSDPNKERAKMHEAGNYGRFLLKEFLKKVPLRQKHNKELMAQAKADFEAKKTAKSAATIENHAGRSCRDWLADIGLVFSKSQICTKYDNRFRSAKAAQTIVCFSHAVLCRFAPYMRYIEYKLKEVLPEKYYIHSGKGLEELNDWVIKGRFDDVCTESDYEAFDASQDQYIVAFEIEVMRYLGLPADLIADYLYIKTHLGSKLGNFAIMRFSGEASTFLFNTMANMLFTFLRYEIKGRERICFAGDDMCANTKLVISREHEWFLGKLKLKAKVENTKRPTFCGWNLCSDGIYKKPQLVLERMCIAKETNNLHNCIDNYAIEVSYAYLMGERAVCRMNEEELEAYYNCVRIIIKNKHLLKSDVREVFQEVC

SEQ ID NO: 642 - protein, 373 aa, Caper latent virus
SGVRAITDEPAKSGGVELTNAAERFEAIYPRHRASDTVTFLMGLRKRLRFSNAAKEMGKLHNARLYGRYLLGEFLKKIPLKRELDHEMMQEAKREFEEKKTSKSAAVIENHAGRSCRDWLADVAQIFSKSQLCTKYDNRFRDAKAAQTIVCFQHAVLCRFAPYMRYIEKKLHQALPDRFYIHSGKGLEELDAWVKSGCFEGVCTESDYEAFDASQDQYIMAFELEVMKHLGLPNELIQDYIYIKTHLGCKLGNFAIMRFSGEASTFLFNTMPNMKFTFLRYDIRDIEAICFAGDDMCASRSLRIKNEHDQFLNKLRLNAKVQFANKPTFCGWHLSPDGIFKKPQLVHESICMAKEKNNLVNCIDNYAIEVAYA

SEQ ID NO: 643 - protein, 244 aa, Fuchsia latent virus
HRAADTVTFIMAVRKRLRFSDPMRESAKLQNAMPYGPYLLKEFLARIPLRPMHNKGFMQAALFDFEEKKVSKSAATIENHSNRSCRDWLADVGMVFSKSQLCTKFDNRFRDAKAAQTIVCFQHSVLCRFAPYMRYIEKKLFEVLPSNYYIHSGKGLEELNDWVISQNFCGVCTESDYEAFDASQDQYIVAFEVCLMKYLGIPNDLIEDYKYIKTHLGSKLGNFAIMRFSGEASTFLFNTMANML

SEQ ID NO: 644 - protein, 1990 aa, Gaillardia latent virus
MALTYRSPLEENVAAYDSNVQSLIASTSAHYYKEEEESNFKFFNYHLTPVAKQKLITSGIYLSPFSAMPHSHPVCKTLENYFLYIVAAPLLDSRFYFVGIKNHKINLLKTRNSDLSMVSKINRYVTSADKVRYGSDFVTKPIYTGECLARHRSCLEGATLKDLVPALKEGKAKHVFLHDELHYWSPRDLITFLELVKPEIMYATLVYPAEILAGAAFSLHPWCYTFQIIGGKLIFYPDGVQTESYEQPLSCGYLLEAKRIITRHSIYMVDLVQSKFAHHLIAITRTEALSPNYRSFGPFDATSSSALSPLMRTENNFIPVSFEIVSRVYRYLRTLKKPDVQSAMAKLSQLLQEPRGVEIKFIEDFSSLVINTGTVRSIIKPELVKLFLGRWLGRLPHALAVKFSGVSEVSLDDFVSQMEPYTFQIKLADVDWNYHHRWDLYSKAEEDYGVDASKLLEESFVANRLYEFGDRARAPYYSVKGQKNWHHILELRSDFDEMYFISTCLRELFNPTLSGISFYEVLGVLTGKLQASKSILISTKSSIRQMQEPGRYNVYMRAVSRYAPKHEREWASSGAKWFFVSDRHNQQYLCDQPDGIAVPKAFKKVFGTVVGDILAGVKLRKRRVVGFRLAEQPTPETTSGEGEGGMRHDPKPQNDAEPIREEEAVPVVVQPEQLCPAYCACGIELERSELIATDLHAFRAPDNLGNRSGGWYSATGVGYKYNGGKHGSLGWPKWLGVWMQLNGIDSDYYNCCLYQVYKEGARIGFHSDDEAIFEEGASILTCNITGSADFSFKCTVGGNSQFLDGPMSILMPEGFQESHKHSVSRCSKGRASVTFRRLAGEMIGEQPIEELRKVCVAEQREQGPESSELPERSGSEQPGEFTQRNCIGVVNHRHGIPNMNYNLIDVPGDGNCFWHCLSKAVSMGVKELKQACTRIDFKDEELNTRFEHQMQPRVFAEEEAIMAAAAILRAKIIVIAPEGPQVSEFTPHGELLQVHYLEMKANHFQLIELKNSCVIRAIASAMNRECHEVLKVLEESGDLEEGSLLLSGLGVELAELEHFFSLFGIAALVEAGGTEHRLNETGPVPAYFKLENAHIEHIRKNCSVKSELLRGENLGLNITNRSLLYAEQCGSYLKYKPNESRAKVLADCFLAGRTGILNSKLFNNSGNLFDEINHNGEHEESVLGVFGTFGCGKSTAFRQFFHLNPGKGVFYVSPRKALAEEFRSKTLSRQVGRLDKIKEKNWLLCTFEVFLKKHHLVKPGMAVIIDELQLYPPGYLDLTMLLCPKGVLFLVGGDPCQSDYDNEMDRPWLGSMESDCERLLKGQKYKYNGLSRRFVNKNFSSRLHCQFTEDRLTEEEPHLLYTGLDEMVQIEDEYKEVFLVSSFEEKKIVSAHFDVKSEAILTFGESTGLNFKRGVIIITNVSALTSEKRWVTALSRFSTNVCLVNLVGVDWSTLAKVYVERTLANFLCAQSHQGKLLELLPGEPHITAGFPDKIGKDEGLREEKMQGDPWLEGMIDLFQIEDVEEVEEQFEELQXEWFKTHLPREELESVRARWVHKLLAKEFREVRMGYLTSEQFTDEYPKDAGVNLTNQAERFETIYPRHRANDSVTFLMAVKKRLRFSRPAKEKCKLIEASSYGRFMLNEFLDKVPLKRKHDPIMMAQAKKEFEDKKTSKSAATIENHSGRSCRDWLIDIGLVFSKSQLCTKFDSRFRVAKAAQSIVCFQHEVLCRFAPYMRYIEKKLHEVLPERYYIHSGKGLDELNDWVKKGRFSGICTESDYEAFDASQDQYMVAFEVEVMRYLGLPNDLIEDYKFIKTHLGSKLGNFAIMRFSGEASTFLFNTMANMLFTFLKYEIKGHEFICFAGDDMCASERLALKKQHESFLGKLKLKAKVFMVDKPTFCGWNLCPDGIYKKPQLVMERMCIAKEKANLANCIDNYAIEVSFAYKLGERALNRMDEEEAAAFYNCVRIIIKNKHLLKSDIRTLYEENKLT

SEQ ID NO: 645 - protein, 1951 aa, Garlic common latent virus
MALTYRSPLEEVLTSFSASEQSLIAEPAITSYRGLERDLFHFFNYNVGPYAKEKLIGAGVYLSPFSGVPHSHPVCKTLENHLLYRVLPSILDNSFLFVGIKESKLNFLRARHQNLSMVELVNRYVTSADRTRYPNDFHLSITAEQCFNRYDGFKHLGPGLRKLLPHCITVKPRRLFLHDELHYWCERDLVTFLSAVKPEKVLGTVVYPPELLKGVKFSLNKWCYDFDVEGDDLIFYPDGVRTESYTQPLSGCFYLKVGTLKLLDGSVYHIDVVHSTFCHHLISITAGEAVRAPTNSFSNFDATTCRGLPNIAFRSLGPCIAVPYPVISRVYRYLRTLQKPDLQSAMAKLSQIMPEPTGYQIKFMTEFSKMVIDTPVGASFFQVAIFEKFKGFLTTFFPKYVAARFDVARIRSLDEFVEHMCPYTFKIKAVVHDMRLHQLLFPRDEEMPRDEDFDTIRALEMQWGGGANGERIGAAYTVGPFCDYPVIDAQKVFQLLRVISREWSFSFSMVQYCERGDYTEFMQASKLIWFSSKLAGWDVCLATYNKYVHMRHSDWKRRLKSFRSIGCAWFCMRVRSYERYICAYPDQAKSYKALDEAYSTVVADLLGSLARNKLIISAAAPKFDKTSKVPREGVAEEIPAHCARTSAAFASAPCGSTASSECCVFELNPPAQIADLSCSCDRTLAVLNVLAYEALELEFPDQLPGCRAGWYVKGPQVADVGGFLGCQQLRWLDFFDSFLELHGAQPGSYNSCFAQVFDLDSTFEYHSGDGGVFEEGAPAYLFQTRGTSRVHVQGLGCCGERALLGPMCFEMPASLLLEHRWKISKSSTGCTIMTFRKLRQGEPPVVETTAPTVQKGVGVDSSFTWEQYGVTILSSHMSKAPDGRIEPQRGDGSCFFHCMEPFTNLEASLLRRTIAKEMARDSKVLESDLVECQGNGPVSDGVIAYTIRFLGLKVRFFSPELNEVRKFSTCTATNFWVDVLHHGNHFDLLYPTNDCVLIALEQGLGRKRGDILKVLSRPQHSDIFQIATGGVGLTLELLEPIFQCFQIDARVLCGSEVFTYPTSGTFALDFELADGHLSFKSARRKETVSSCLKVVEASPHGRLVLNCAGTGVLFEICSNTAHKLAESLFDGRTGIVSSKLFNNRERFEVSSTSLLPRTLNVICGVFGCGKSTLLCKALEKGLGVCIFVTPRRSLAEQMTQLVQSVETSTSVTILTFEKFLHQMVNVKEGSTIIFDEFQLYPPGYFDLVCSQLTDGISLHLLGDPCQSDYDNAKDRGVFEGLLPDHQRILQGIQFRYATRSYRFSNPNFVGRLPCAISNTNEDDFEDFEILEGIEQVQEIDVECYLVSSFIEKQAVRALVGLDKVVQTFGESTGLTYDCVAVVVSEASKLASERRWITALTRARKRVTFITNLGCSKHLIAEIFSNRALGRFLSCTASIDNLRCLLPGEPNFVEELVPTIGANLGVVEEKVSGDPWLKTMLFLGQVADVADEIDVDEALQIEPFKTHVARSNLEGVRALWHDKIRLKEHREKRMGYLVSEQFTDMHSKNMGKKLTNAAERFETIYPKHKGSDTVTFIMGARKRLRFSKPAVEARKLMDASNFSEFMLQEFLKHVPLKKPHNQAFMDASLADFEEKKTSKSAATIANHAGRSCRDWLIDTGLVFMKSQHCTKFDNRFRDAKAAQAIVCFQHAVLCRLAPFVRYIERKIAEVLPEKFYIHSGKGLEELNAWVTRGRFEGVCTESDYEAFDASQDQYILAFELHVMKYLGLPRDLIEDYKFIKMHLGSKLGNFAIMRFSGEASTFLFNTMANMLFTFLRYEIKGHERICFAGDDMCANARLRHRLDQEKFLGLLKLKAKVSFTQKPTFCGWNLCSDGIYKKPQLVLERLCIAKETNNLACCIDNYALEVAFAYKMGERAVLRMDEEELQSHYNCVRIILQNKNLIKSNVLTYFSA

SEQ ID NO: 646 - protein, 1971 aa, Hippeastrum latent virus
MALTYRTPMEDIVSAFDPATQAAIANTAAVNYKNMEENLFSHFNFFLSPVAKQKLSNAGIYLSPFSAVVHSHPACKTLENYILYKVLPTYLDSRFTMIGIKNNKLNSLKSRNPKLQMVELVNRYVTSADVSRYGSEFVCRRSEAHVGLKRHARELCGPTLHDLVPHMMKVTNKYAFIHDELHYWKPQELCTFLEVFSPEVLLGTVVYPPELLIGSTSSLNKWCYEFEIVGSDFMFYPDGVRSEGYLQPINGGYLLKSNKISLASGDIYCVDVICSKFAHHLISITKGDRITPSYRAFAPFDAVSYSALQSISRTARPCIPVSFDIVSRIYRYLRTLKKPDKQSAMAKLSQISPDPSGVEIKFVQEFAELVIDTETIRSTLNPQRLRNFFGKLGQKLPGVLASKIDAVKEMCLDSFIETLEPFTIGIKLKALSHLENFEAWSALDAEAEDDFELPENIEMQFIRGRTRAVPERVARGYVGLPMDCGRGSCRSTWVSRELVLEYGSAAVTRGMSVVEREQCTASLVQEKCRSMFKTSLYFGLAAIELVGDLDELSVEMAKRIQRKARGPKRCDIYTMGLRWFFSGDAADTKYLTQWGEHVAVVPEIGRKWKMCVNEVCSSKFKLRKTKNTRTYTQLLKHVKVDNQESEHARDGNPTEAGSSLADCRANVCTQCVGMDALRSLAYTDHMFKMPCETEYGVVGWYSRGEVICALDGHEYKSLGWPEWLQLWCAANDVAQRYDCCLVQKFAAEKDIVGSMVSAEQVEDAEGALWVNLQGTLKFGMNCTSGKFELGLKEFECLEVGKRSFEGHSIGSAMCTGNSLSARFMCLKTANRVDTIAMEQHEASGAQPEVDKNMAIQPVPRPLYSTELEKVGECTRTANKWLYGSNFKVVETPGDGSCFWHSLSYFMGVAAELIKSRAVKHSFDSEVLNKELGISARENAYATDASIFAAALVHRLEIRVLEVSCGILHCFTVDNPRQICLIRLNGQHFEPILLKNGCVITAVAKLLGRRDMDILAVLEREASRELCFEIWRGAGVSMASIQSVFAIFDIRGVVKGQENTTVLNAQGAFEGLFSLKDDHLEYVGRKKDPCCEPLLVTNNAKVFRAADLDKLMQGGTMIEFKIEHARAKILADSFHSGGTGVLQSEIFNAKANFAERFKRPDGTLVEICVICGVFGSGKSHGFLELMQRSSGKIVDFVAPRRALSDEMQKKLEIPKTKRKAGQENWRICTFEKFLDRCAYLIPGQLVCFDEFQLYPPGYFDLCLSLSVPGVHFVLLGDPCQSNYDNERDRGNFIGMRSNVDKILGGREYKYVVLSKRFLNANFLGRIPAEIAAEQLCLTEEHVIRQGVEYITDVCADFDNVVLVSSFDEKKLVYSYVPLAKVYTFGESTGMTFKRGCILVTSVSERTSELRWLTALTRFRENISFVLCAPLHLQNVMLSYRGRCLAKFLAKTAKVEDLLQILPGKPDYQMSYSRLIGKDEGVREEKLAGDPWLKGMVDLMQAEDQEDVEVLQEICAEEWFKTHLPRDELESVRARWVHRIMAREFRECRMGHLVSEQFTDEYSKQKGGMELSNAAERFEAIYPRHRASDTVTFIMAVKKRLRFSKPAVECAKIMKAQQYGKFLLDEFLKKVPLRRARDTVMLEQARQEFFDKKTSKSAATIENHSGRSCRDWLIDTAQIFSKSQHCTKFDNRFRVAKAAQSIVCFQHEVLCRFAPYMRYIEKKLHQALPDKFYIHSGKGLEELDCWVKKYRFDGVCTESDYEAFDASQDQYIVAFEVAVMNYLGLPRDLVRDYLYIKTHLGSKLGNFAIMRFSGEASTFLFNTMANMLFTFLRYDIRGDEAICFAGDDMCASRRLRIRDEHSQFLGKLRLKAKVQFTNKPTFCGWNLCPDGIYKKPQLVLERMCVAKENNNLANCIDNYAIEVAYAYRMGERAINRMDEEEAASFYNCVRIIVRNKHLLRSNIRNVFELNTLV

SEQ ID NO: 647 - protein, 1981 aa, Hop latent virus
MALTYRTPMEDIVISFEPQVQSLIANSAAELYKNLEKENCKYFNYYLPAVAKKKLSAAGIYLSPYSAVVHSHPVCKTLENYMLYSVLPNYLDGKYFFVGIKNKKINLLKSRNKKLESVICINRLVTSADRLRYSNDFVTFESVSHEDLRRHGPGLSEPALQGIIEPLKRRKATHLFLHDELHYWGSDDLCNFLQVVRPETLLATIVYPPELLFRQNRSLNEWCYTYEVRGQNLFFFPDGVRSEGYEQPLNGGYLLGCNKVVLKDGSVYMVDVLCSKFAHHLVAITRGAAVTSMHRSFGPFEACSSDSLAKLCPDYPVCFPVPHDVVNKIYRYLRTLKKPDVQSAIAKLSQIVSEPSGREIDFIEDFSKLVIKNESFNITIVPERLRQFVGTWLGRLPSALASKLEQVQSLCLSEFIKSLKPHNFTIKLEALKYNHLWNDVRLWVSEEGLEDYSIEGIDAKFTTGSHVPPRVASPYQGLAHFCDRAWKPLLLVDKKMLSSVLKRLAVQRFRGEHRRRISTAELESFVDSLLERAKLIQKQNRKGSFRERIAAHHYLNYDTIRDAARAIASLCMRWVRALFSELGPRWFLRFNRSNLMWLPAPSDAILLSREAEQNWAEVVRSICTQLGKSSYSWGQLTRTTPAEELPRATDTSGMLPVAASVGLAELSRAGTLGCSCGVAMDISSISVAEHPFVARDFLKGRKAGWYSMGDVPYTYNGGSHKSQGWDSLLQMWCEANAVDPKYDSCLYQIYTEGAALGYHADDEDLFEQGESILTLNLSGAAEFGVKCKNGKGSVHLRGPQQFEMPAGFQVTHKHSVWGCSRQRESVTFRCLRKSRAIAQSVPASAAPELLYEHAVEAQQVLVEKAERNADVVAYKLGSVDVNVCEALWETVSYAALDVPGDGSCFWHSVGLLLGLNSLELKRRCVGYRFHAEGLDAELDKAAQDGAYADDTCVAATVAVINVQIRIWNKDVDKLFTFSKADVDKVIDLQLEGEHYMPMLIRNNCVVRAIADGLNRLECEVQHVLERKCAPVLLEDLRKGRGLEPMNLELVFSCFGVCALVDVGGRTVVYNEGGGTHMQFTLYNEHLSYNPRKKKPSLDLVAGAKHGKLFAASVIESLQAMGTMIARKPDITSAGLLADSFFEASTGVLRSSLFNDQSNLRKAFIENAGEESKPICTILGTFGSGKSYIFKKLLSGGAGRAFDYVSPRRALADEFKRSVGLVKKKGSQKVGQENWKVSTFETFLDRASHLLEGQVVVLDEVQLYPPGYIDLILCLLHVPVHLFLIGDPVQSDYDNEKDRAVLSCLAECCTALLRDETYKYNMRSKRFCNRNFIGRLPCTILESDCTTEEPHVLRAHIDNLADLEPAYTEVILVSSFDEKVVAQSYQSKARVLTFGESTGLTFDYGTILITSVAERVNEKRWVTALSRFRMNLCFVNCTSMSYEQLAVRYKGRFLCKFLCRGARTEDLQQLLPGKPQFTEEYSKAIGKDEGVREAKVAGDPWLKTMVNLLQAPDMQEEEIAEMALPEEWFRTHLPREELEGVRSRWVHKILAKEAREVRLGDIVSEQFTDDHSKQIGGRQLTNAAERFETIYPRHRANDTVTFIMAVRKRLSFSNPARERAKLHDACVYGRALLDVFRKHVPLRPEHNHKFMEAALWNFEEKKLSKSAATIENHSGRSCRDWPIDMAQIFSKSQLCTKFDNRFRLAKAAQSIVCFQHAVLCRFAPFMRYIEMKVHEVLPARFYIHSGKGLDELNSWVKGGKFDGVCTESDYEAFDASQDEFIMAFELELMKFLRLPHDMIEDYKFIKTSLGSKLGNFAIMRFSGEASTFLFNTLANMLFTFMKYEIKGDEYICFAGDDMCASRELKVVGKYKKFLDKLKLKAKVQMTQKPTFCGWHLCPDGIYKKPQLVFERMCIALELNNLANCIDNYAIEVAFAYRLGERAVNRMDEEEVGAFYNCVRLIVRNKHLLKSDVRAVFEESPVS

SEQ ID NO: 648 - protein, 1999 aa, Kalanchoe latent virus
MALTYRSPIEEVLTLLEPAAQSLISTTATTSYQQNEKENFQWFNYSVTPIAKEHLSNAGIYLSPYSGYPHSHPACKILENYMLYKVLPSIINNTFYFVGIKQFKLNFLKKRHKNLSLLTAINRYVSSADKIRYGNEFVVRESSESRLLKRHCGVHESATLSALVPNVKTHANLFLHDELHYWSKDDLITFLEICKPNIMLGTLVFPPEIFIGATTSLNRWCYDFEVRKDKLFFFPDGVRSEGYEQPLNGGYLLQTNQIELPDGTVYCVDVIASKFAHHLVSITRGQLVVPTYRSFGPFEAVHVGAMKDISRGFKECIPISIHTVLRVYRYLRSLKKPDKQSAMAKFSQLSHEPSGMAIKFMEEFSNLVINTESIRTMVQPELIKTFFGNLGRKLPSSLAAKISVTRSVCLDEFIGFLKPLCVDLKLKSMSRSTLLDFFPLVCEEEEGVDLVDAYDBNWNGAGMFAREPRPYIGMAPIIDNLEKFRLSLNLDAMLQGLMDLHLKANYCRCTGFTTTLWDYIESLRRNATIIAQAFLHVLSRAAIEKADKWLHAVYVREVGFHELKHKWFSQRTSRSCMKYLACPTEESYVRQFESTTHMKPPMKGVVLRKFSLDDFDEDLYYNLSNDLSTPSLVQRQSLGPSDPVSPPRFLGPTTHAHFKAYSIDELDEDQYYNFEKHQITPVRVTPQEVRCEALIPAKQAEQNRSLTCKCGINLPICKLKFNEELPFEFTDQLKGRSGAWYSLGNVDYSYNGGAHKSKGWPQWLALWMKVNSIDEKYDCVLVQQYAANCAIGLHSDDEKIFRRGESICTVNLIGSAQFGISCGVVTWHEVVQGDVFTMPMGFQENHKHSVQHTTAGRVSLTFRVLATAQSLPRIMPHVESSSSDHEGPSTEAPNQMGTKFEMDGVTISCRKLRVHPKCKVIKNSGGGDCFWLALEYFTGVTMKDMKQAIKQNMCDGNSERLEAQMGPQVYAEDEAICAACKQFGFDIVVYDHMQGGVITYSSVDNSKCALMKLAGSHFEALVPIETCTIKALAECLKRREIDILTLVAKAMGHEFLESLLAGTGLTIDQFSCMATLLGINSVVEMNGEVFRFNVEGNICGLFRFENGHATFVQKRPTAAHVHTNVAVHGLEITDRELLPITSISSKVEYTPDISRAQLLSDSLNQGTTGVLCSELFNEQGVLMPANPTRVKRRVNVVLGVFGCGKSHSIRQVLANSPGRAIIYVSPRKFLNTQYESYLTSLKEAKGGEHVKNFKSFTFEKAILKSSAFLPGALVVFDEVQLFPPGFMDLCFCRMAENIHVLLLGDPCQSDYDSEKDRNILSALGPDISNILKDQTYNYNIVSQRFLRDCFRGRLPCKFGVELKKGEQLQLIEGLDSIDASKSYAKVCLVSSFEEKKIASAYLGAKCKIYTFGESTGANFDEGCILITSVAIFTSEKRWVTALSRFRIKVALINASSTSWDILCKQYEGRTLGHFLSKTAKPEHLQSILPGKPLFTEGFLIERFGSDEGKREEKLQGDPWLKTMVDLLQVEDQEDIEEAKVILHDEWFKVHLPQCEMEGVRARWVHKIMAKEFREKRMGFLVSEQFTDEHSKQKGKELTNAAERFESIYPRHRAADTVTFIMAVRKRLRFSDPIKEAAKLNQAMPFGPFLLKEFLARVPLKPMHDARMMAEAKFDFEEKKTSKSAATIENHSNRSMREWAIDIGLVFSKSQLCTKFDNRFRDAKAAQTIVCFQHAVLCRFAPFMRYIEKKLNEVLPEKYYIHSGKGLEELNAWVIRGEFKDTCTESDYEAFDASQDQYIVAFEVHLMKFLGLPNDLIEDYKFIKTHLGSKLGSFAIMRFSGEASTFLFNTMANMLFTFLRYDIKGAERICFAGDDMCSNTRLHVSSKHEGFLKKLKLKAKVAHTVNPTFCGWNLCSDGIFKKPQLVFERLCIAKETNNLVNCIDNYAIEVAYAYQMGEKAVARMNEEEVDAFYNCVRVIIKNKHLLKSDVRLIYESGKIQ

SEQ ID NO: 649 - protein, 171 aa, Lily symptomless virus
KLGNFAIMRFSGEASTFLFNTMANMLFTFLRYEIKGDERICFAGDDMCSNKKLFISQKHADFLGKLKLKAKVAHTKTPTFCGWNLCPHGIFKKPQLVLERLCIAKETNNLVNCIDNYAIEVAFAYKMGEKARERMNEEELDAFYNCVRIIVKNKHLLKSDVREVYEERAER

SEQ ID NO: 650 - protein, 1966 aa, Narcissus common latent virus
MALTYRTPIEDIVNFFEPQTQAVIANSAAAIYKQLEEVICQYFNYYMPAMAKRRLSTAGIYLSPYSAVAHSHPVCKTLENYILYTVLPTYINNKYFFVGIMERKLQLLKNRNSHLDSVQCINRYVTSADKMRYGNDFVVFNSHPNESLGRHGKGLTAPTLKDIVEPLQRRKAKQLFLHDELHHWSSKNLVDFLTHLRPDTLLGTLVYPPELLFKQTRSLNEWCYTFEIIGGTFFYYPDGVRSEGYQQPLAGGFLLKTSKIVLEDGDCYMVDVLCSKFSHHLVSLTRGEAINCTHRSFGPFEATASEELTALSPEYPICFPVSYDIVNKIYRYLRTLKEPDEQSAMAKLSQIVAEPTGAEIDFVEGFARLIIRQSSICSTILPDNLKLFLGYWLSKLPPILAAKIQNVREFCVNQFIKSLRPYNFTAKLCEVKWYDNWENSFDWLMDTSTNADIVSLLDSSFTSGAREAVPRWVGAPYTGLAPVHERAWRSLLKIPARHLFACIRRMYYHEVFCEHTRHISLSFVEEFVHSKLRSSFLIAKERRIHNSKTHVPIFELLGFATKRHLFVALRSSCARKMRSSFTEAGLDWFSDLRRCNQKFVSNVPDATGVHPALTKPWKVVIRDVLEMPRFKNSNIKQGASTPASSSSIPPKSITAPPEQKQQCAQSALQLACACGLSLPVRTLLFADHALKAPYDLKGCTAGWYCKEDVQYNCPSGSHASLGWPTFLDTWCEVNEIPAKYNSCLYQVYKAGSSTALHSDDLGMFIPEEGFLTVNLGGSATLSTECSGSVRSVVLDGAVFFEMPHGLQSTHKYSVSDCSPGRASLTFRCVSMPPPAQLAGSGPQSPTHEAATQCTSGGAKAQELTIGGVKLTTVTQPTKANYRVHSVAADGSCFWHSLSMLSGLESQQIKKLCMSHSFSDLALNAELAENAKLDAYTTDVGICAASIKLRTEIRVWNMSTGLIHLFVPRKSTAIMNVRLSAAHFEPIFLRNGCVVQAIAAALGRREAEVLKVIETKGTTELCQQLWVGDGLDLLLVELAFKCFSIVAHVNFGETESILNSDGTAHYQFSCSEGHITYCGQKKDPGATLLAKTPHNKSFSPAALEMLKSSGLVIEYMPQIERAQVLADSLFRASTGVLQSALFNNKQNLRGRFRQVHAIPVCVIAGTFGSGKSTLFKRLLEHGSGKIFDFVSPRRALADDFMAQVGLSKGRKNIKVGQENWRVHTFERFIDRVPYLNEGQVLIFDEMQLYPPGYFDLIFHLAKVDVHCFLVGDPCQSDYDSERDRLTLSALENNVSQLLDGREYPYKITSHRFLNRNFIGRLPCRIVEADCTLDQPHELRMHLENMPKLEHKYLEVFLVSSFDEKTIVYSYLPDATVLTFGESTGLTFSYGTILITSISERANDKRWLTALSRFRLNVCFLNCCGYDYNARAVRYKGRALAQFLCKAASEEHLLTLLPGTPQFTEVYGCKIGKEEGLREEKLLGDPWLKPMINLYQAPDALATELPEEVLQEQWFKTHLPREELESVRAQWVHKILAKEFREVRMGDLVSNQFTDEHSKQLGARQLTNAAERFETIYPRHRANDTVTFIMAVKKRLSFSHPGKERAKLHNAMNYGRALLKEFLKRVPLKPNHNKRFMDEALWNFEEKKVSKSAATIENHSGRSCRDWPIEVAQIFSKSQLCTKFDNRFRVAKAAQSIVCFQHAVLCRFAPYMRYIEMKVQEVLPRNFYIHSGKGLDELNAWVRRGKFDGVCTESDYEAFDASQDEYIMAFELELMNFLGLPHDLIEDYKYIKTSLGSKLGNFAIMRFSGEASTFLFNTLANMLFTFLRYEVKGHEFICFAGDDMCASAHLRKTEKYSKFLDKFKLKAKVQFTAKPTFCGWHLSPDGIYKKPQLVFERMCIAMELNNLSNCIDNYAIEVTFAYKLGERALNRMDEEEAGAFYNCVRLIIRNKHLLKFDVRTVFEVSDCT

SEQ ID NO: 651 - protein, 1873 aa, Nerine latent virus
MALTYRSPIEDVISSFTSSEQSLITTKAVSAYKGKEDELFDFFNYALPIKAKEKLINAGIYLSPYSGMXHSHPVCKTLENYMLYVVAAPLLDQSFYLVSIKKNKLSLLKRRCKSLETVEYLNRFVTSKDRIRYSNDFVGVDAEMPSTSYDACERRRNIMFPRNFQGKSRKLFFHDEIHYWSRKDLIYMLEQFRPECILATLVCPPEILAGSKESLNKWCYEYKIDGGKLHYYPDGVHSEGYTQPLDSSFLLKTKKIQLDDGETYCVDLIHSKFSHHLISITKGDAITDDVRTFGNFDAVSAGHLKPLGRNIGQAFPISINVISKIYRYLRTLQKPDVQSAIAKLGQLLVDPTGFEIKFIEEFAPLVIETGKMRSILMPDLLKIFKADXYRVLPDFFARMLKETSEVSLDKFIANLESFNFQVKLITLDSKIPIFLQFQEEFSXESASHEPLIDDTFNGTISYNLKKIKXAEELERSKFLGSRHSIRLASDLAAKLFAFIFYRSFSDSDGRIKSCWSKIGGTYKALQKSKFGFLMKEATFLDARSKIEWRLRSLNFRYGKIYFSENNLRWFLEKVRRFNQKSLCNAECGLLPCSKKAYTQVLADICKLRKKEDHKKIDLDDGEKQTXEGEQWYIEADNEKFGEAMKLCEMAYNFDEHQGDPSLETLSTFSDIISGETHSXFICFQPVNNIDLFDKFFFFLDFTQNFMGACFEGFKMYKFLPNSVTLSDCANLILCENLVEAVAPAKISVDESXAEGEVREEKEAEVEIMETNNCEADXNEPTFLPSCFLTLSSNREYLQEFKVVKTVGDGDCFWQSLGYFLNQDGLALKKYVFSKVDTCSEDKELMRQKGDKVYAEQEAIGLAAKVLRIDIKIICPEMPFDIKVMGEESENLATLLLLKGHYDILLPKEDCAIVAVSETLNRRYQDVYRVLNREENSYILREMEEEKGVNLTTFERILSLFSIKGFCTVDGEIVVLNDGGNFEAYYCISEGHISKIKKQKFYDSQKQYPKLCNKLTSAMSKELEKIADIIPFTPSSXRATKLAQSFHEGRTGVLCSEIFNGMRKKEVSQIVPKXQNLNVILGTFGSGKSSLFVKVIQNESEKAISYVSPRRSLADEFDKRVRKNGKSKYKAFTVFTFEQFVKKMTRLRKGQTVIIDEIQLYPPGYLDLVLICTQHLELTYYITGDPCQSDYDSELDRGFFLGDPSDIDEVLKGKEYRFNAMSKRFRNKNFQKRLPCKMRELTIDDDFIILDGMKEFEELELKYKKVILVPGFEDKRIFSYNDSCEEVLTFGESTGRNFTWGCVVITHSSIQVSEKRWITALTRFSDGISLLNLTGENSANLEKIFDGRVLRKFLLQSANIEDFKKMLPGSPIFVENYGEKLGKNFMIKEEKVRGDPWLKGMLDLMQDEDQLEPEAMEIIMQKESCKTHVPRSNIEHIRSFFLQKLKAKEYRECMFRNNITNQFTDKYEKGNFKRLTNASERFEAIYPRHKGDDTATFLMAVKKRLRFSKPAQEVAKFRAAEPFGEYMLGVFLKHIKLNKNHEPQKMADAKREFEEKKTSKSAAVIENHSGRSCRDWLIDLGFLFIKNQLCTKFEKRFADAKAAQTILCFQHEVLCRFAPYVRYIEKKLNDALPAKYYIHSGKNIDDLNDWVKDNDFSGICTESDYEAFDASQDHYIMAFEVAIMKYLGLPRDLINDYIFIKTHLGSKLGSFAIMRFSGEASTFLFNTMSNMLFTFMKYEINGSESICFAGDDMCASKKLRLSDEHSSYLEKLRLKAKVCFTTRPTFCGWSLNRLGIFKKPQLVYERMCIAIEKNNLQNCIDNYAIEVSYAYLMGENALVLMDEEEIHNHYMCVRTIVQNKNLLRSDIYKVFQQA

SEQ ID NO: 652 - protein, 1946 aa, Passiflora latent virus
MALTYRSPIEEVLTYLEPAAQSLIATTATTSYQQNEKENFEWFNYSMTALAKEKLSNAGIYLSPYSGYVHSHPVCKTLENYILYKVLPGVINNSFYFVGIKQFKLNFLKKRSKHLDMLQCINRYVSSADKIRYGNEFVVRRSTESRALRRHSLVEQSDTLRDLIPNVPGYSNLFLHDELHYWSKEQLITFLEICKPQVMLGTLVYPTEIFAGSKNSLNPWCYEYEIKKGRLLYYPDGVRSEGYDQPLEGGFLLTANKIQLLDGTVYCVDIVCSKFSHHLVSITRGDFVVPSYRSFGPFEAVHSGPLKDISRAAGECFPVCYHTVLREYRYLRSLKKPDIQSAMAKFSQLSHEPSGAAIKFMEELSKLIIETGDVRTVIRPELVTTFFGNLGRALPAIIASKIKSTRSVCLDEFIGTLRPLSVDLKLITVTHATEIRVGLDECEAEEGVELVEMIDERWEGRGSALFERARSPYSSMVPLYDCPKRWKVACARTWLLKLYWKRYVSACFSEQVGFSMSVGEYVGAALNRAKMIGLAPLLLATRALGKRRGNRRDWPRPKPTLPYDCSVQCLLRLSANGAWIAFLEWHGHGERKVPNTPGRGMIRGGIRMTFFARIATFSKNCTLRMPIKQPLRAAQGPYHFQRILVFGETGEERKCSGEVIECLCNSHIPVNSLLHDGDCSVEFPSKLEGREVAWFSKGAVPYRCAGSELKSLGWPLWLTPWLELNGLPTKYDCMLAQKYVEGAETGFHRDDGTLFKVEESVLTVNLLGTAEFGIECKNGAVWRNLGHGDYFQMPAGFQGSHRHAVRNTSAGRISYTFRVLNELKSGEIGEACRPGGETKNEGGEQFEASIDGVKVTYRPLSRTRKYRIIGNSGGGDCFWLAMSYFTGINVLDMKESILSSTSQHDKRLREQMGLKAWAEDEAILATCKKLGYDIPMIDEAKSRDVVRANGGNTLLATLRFTGNHFEAIMPIEGCTIKALADCVKRQEKEVFSVLAHSMGREFLREVLEGKGVSLEQFATMCNTLDVRAVLELEEGTMLVNEVGRIEGYFSLLEGHAVFKKGKPLARHTQTNVHDKELALTDEELLPISTVSTRIEFKPSKVRAGLLSDCLHQGSTGVLCSELYNNRKPLMPEEPRLGAREIHVVLGTFGCGKSTLIRKVMCKARSKAIIYISPRKFLCDDFQRSIEEMKIEFGRKAGELFRSLTFEKASLQASKVIPGALVMLDEIQLFPPGFVSLLCCLLHEEVKLALFGDPCQSDYDSEKDRAVLGALESDIVDIIGDRSYNYNTTSRRFRGELFRGRLPCDHAEPPSTSSKLVIIEGLDNVDCTAESSKVCLVSSFEEKKIVQAYFGAKCKALTFGESTGANFDHGTILVTHISVHTNERRWVTVLSRFRESVVIVNAVGISTELLAKVYDGRSFGHFLKSSAKVEQLLPLLPGKPVFTHGFIANRFGADEGKREEKLQGDPWLKTMVDLLQIEDLSVVEEAKVVLESEWCKTHLPQCDLEGVRARWVHKILAKEFREKRMGYLVSEQFTHEHSKQLGKHLTNAAERFETIYPRHRASDTVTFIMAVRKRLRFSNPVKEAAKLNQAMPYGPFLLSEFLKRVPLKPMHDSRMMAEAKFDFEEKKTSKSAATIENHSNRSMKEWAIDIGLVFSKSQLCTKFDNRFRDAKAAQTIVCFQHAVLCRFAPYMRYIEKKLNEVLPEKYYIHSGKGLDELNEWVKRGGFGRVCTESDYEAFDASQDQFTVAFEISVMRYLGLPPSLIEDYKFIKTHLGSKLGSFAIMRFSGEASTFLFNTMANMLFTFLQYDLRGDERICFAGDDMCSNKKLHVSDKHSSFLKKLKLKAKVAHTDRPTFCGWNLSPDGIFKKPQLVLERLCIAKETNNLINCIDNYAIEVAFAYQMGERAKNYMTEEEVEAFYNCVRIIVKNKHLLKSDVLQVYQTDLVM

SEQ ID NO: 653 - protein, 1908 aa, Pea streak virus
MALTYRSPLEEVLGSFSSSEQSLIAIPAIANLKGVEQENHSLFNYALSPIAKQKLISNGLYLSPFSAMPHSHPVCKTLENYLLYKVLPNYLDHRFYFVGIKESKINFLRSREKKLNLCEVVNRYVTSADKARYGSEFTIRRTLDSDNEIKSKYGRLPPNLVDLIPQFSSKQGLHLFLHDELHYWTRADLRLFLTACNPIKMLATVVIPPELLIGATESMNKWCYTFNVEDDELFFFPDGVTTEGYSQRADCADLLTLSKIILDDGTTYCVDILCSKFSHHLIAITRGDAIVPKTRTFSNFEAVGTKGIADLMEGNVQCLPISYTTISKIERYLMTLNKPDVQSAIAKLGQIVQEPSAFEIKFVREYAALHISKRGLNSLILRDNWARVKAEFLKLLPKAFYGRFDTILKVALEDFESNLAPLSFRVRLEEYGSESLTNRLDSFIYRTGGVAAVVNGLIELFGPINKSDRKSSPYSDFYCAELFVVNSGTLRRSIIDMLKRSYSHNALMELSPYSFFNLLIERAEGNLVARYVLSGLQPEDIDAYIMRALSELQEEAEEQILDRKLLTHLELSVEVKADPEKSDEEEVEEVGEEKPFERAVHHIDCECGMKFECGKTMLVDHARVNFIDDLGNRQAVFFSKCQVDYRYNGGAHEAVEWPEWLNMLLECNGFDPEEYDCVLVQIYSGGSSIGFHSDDEAIFPKDGKILTMTTGGDADFSLRCKEGGFTFRFEANTYLIMPEGCQISHKHAVRDCDHGRISYTFRQLKQCREYMERECEVTSSIDPSDDDQSVEIITLHEVEIKRGRDADKQALEVIEVPGDGNCFWHSLGYYFGLEGRSLKEISFSRLEEMDWDLEPLKKQMSGYEFCELESIVAAARLHSVEIEIIDHNSSMVWVFTPKNNLRQYARMQLVGEHYSPVIPKEVCVLRAIADSLGKSLQDIHRCLTKAENRHLLELVESGEGLEVFLIEPFMVLFGIRAVIDNDGDLIVLNAKGALERFFQNYGDHLTHVSKDKIVGLERFGEFEGQGVERNSLAALKSAGTELIYEAKKDRADILCESLHSGLTGVISSKLYNDQPLIQNPGPNSICRSLTVILGTFGAGKSTLFIKFLKANEGKRVHFVSPRKVLAEEIRSNMARALGYESGRMGKSGKLKSKNWFVHTFEVFLLKIRSLKAEDCVVMDEVQLFPPGYLDCMTYQLNGKCELIALGDPAQSDYDNEKDRNILCCLGSDIERALVGNEYDYTIGSYRFQNRNFLNRLPCSFMHQSLEIDEPYLIFEGVGEFLKVFTEYRSVVLVAGFTEKKLVRAYYGQECRVLTFGESTGLTFDRGLIIISADSLKVNEKRWVTALSRFRQNLALLNLTGDTLENLVLRKANSMLANFLKGSSKVENLKEILPGVPKFKQTFIGKVGKDQGLVEEKLQGDPWLKGELFLGQTEDAEVIQINEFMEQDQWFKTHLPRCEMEGVRSRWLHLLLEKEAREYRFRDMVTEQFTDDHDRGCGEKLTNAAERFEAIYPRHRASDNLTFLMAVKKRLRFSKPHIEEAKLNEALPYGKFLLDEFLQKIPLRATHRPDLMAEAVQDFEEKKRSKSAATIENHSGRSCRDWLADVGLVFSKSQICTKFDNRFRCAKAAQSIVCFQHSVLCRFAPYMRYIEKLLGEALKKTNYYIHSGKRLEDLDDWVVKGNFSGICTESDYEAFDASQDHWIMAFELTLMEHLGLPKDLIADYRYIKTHLGSKLGAFAIMRFSGEASTFLFNTMANALFTFLRYDTRGDEFICFAGDDMCASKHLKVSNKFEDFLSKLKLKAKVQFTKNPTFCGWSLLPFGIFKKPQLVYERICIAREKKNLHNCIDNYAIELSYAYKRGELAVNAMNEEETDAFYNCVRVIIKRSHLLKSDVKDIFLNAKSLMESLN

SEQ ID NO: 654 - protein, 179 aa, Sedum latent virus
GADTSFHYGSAERLRFSCPVKEAAKLSQAMPYGAFLLRTFLDKVPLKPMHNAVMMAEAKFDFQETTCDKSAATIENHSNRSMREWAIDIGQIFSKSQLCTKFDNRFRDAKAAQTIVCFQHAVLCRFAPYMRYIEKKLCEVLPEKYYIHSGKNLEELNEWVVKGPFDALCHGSNYEAFHA

SEQ ID NO: 655 - protein, 1924 aa, Shallot latent virus
MALTYRSPVEEVLTSFTTSEQSEIARGAVQGLLKLEEFNHNLFNFALSPIAKQRLCGSGIYLSPFSYVPHSHPACKTLENYNLYQVVCPLIDHRFYLVGIKQSKLCFLKGRNRKMDMVECINRMVTSRDKLRYGNDFVVQAGQPGTVKKNSRTVTFYPELASLVPHEIKFRSRALFLHDELHYWSKESLAIFLDQCSPELMLATVVIPPELLLKAKESMNKWCYEFEVKGPDLYFYPDGVRAEGYIQPAGCVYLLTTNKMITPGGQVYCFDIISSKFAHHVIAITRGEALVKKENSFSNFEAIGSSFASKLLHDEYPCFPISYEVVMKLYTYLSSLNSPDVKSAVAKLRQLVEHPTAFEVQFTIEFANLYIRCGVNLDIFTPSTKTLLLKSLAVLMPALLTKYSKKLMRVSFTSFVSHLKPLSFNVKCETIDLKTHAKPCYDRLIPPGIDSLMNCLEFGKITSGKENFSREPAPYSFSLNETCHLHCAPEELLIANMKFLGDLESFTFSSTDQVLAGAATVFRPLYQFLFSILGEYCVDYCLMQAARKQRIEKNERTAAKVLALPWFSNESYGDVTVYPAPVFNCLEHEEENWGAADTVDDIEPMLLNLFNCVCGAGIQWTVAFHVELLDVSIDDRLLNRRAAFYSKGCFGYSYNGGNHVGHEWLDNFDSFLAINGHDLNYFNCVLFQQYDGGHGIGFHSDDEELFEKNSKILTICIQGDCEFRFRCATGETGFFMEAPKQFMMPEGFQESHKHAVRGCSPGRISATFRRAKVPPVDDFLTSENGKVDSENGVDDGGESECLSFIDNLGVSHTVQKNVNIAPFVVREVSGENNMCFWNCLSFLLNLDALPLKNNLSKGLEKLRGTTIHATLAEQLAPGAMAEDDVISLCCQIFSLEIVVHSLSLGCTTNFATEDAEKRIDILHDNEHFSLLFYKNDCFVSAVAQTFSRDTNEMYRVLADKKFDELTELLRLGCGLTIEDLEVGFKLLNIKAHIMKDGEYLQINDSGEINGFYSLTDEHLVACPPFSKSLFATKTILNSNEHLAVTAIKMLREVGSELIYPASLDRASNFERSLLKGCTGIRSSTLFAGLSSRLKEGHNDHERSLTTVLGTFGSGKTSLIKRAVVNFKKSGRVVHFVSPRRSLADALIQSLGLTDRSGTCIDGKGGSKRKGKKSSQNTFVRTFETFLIQNSRVGGNDLVFFDEIQLFPPGYLDYTPMLLPATVQFFILGDPLHSDYDSMNDRHVFLGYESDICNLLKGREYKYNILSRRFSNKMFASRLPCSFKSECFTTDEPYVMLQGFGANLDEIKNFSEVYLVASFVEKNFVKAHLGENVKVLTFGESTGLTFERGSVFITESAFKTSECRWVTALSRFSRNLILINMLETTFESLASQRSTTVLGRFLRGTADPSHTLENLPGKPIAQYGFTHCVGRNLGVREAKLQGDPWLKSEIFLGQEDDMQEIEEVAELVQKEIFKTHLPRCDLEGLRAQWNDKILSKEAREFKFRNLVTEQFTDCHSKQKGKILTNQAERFETIYPRHRASDTLTFLMAVKKRLRFSKPHLECAKLKEAEPYGKFLLDEFLKRIPLKPHHRHDLMSEALHDFEEKKVSKSAAIIENHANRSCSDWLADVGLVFSKSQICTKWDNRFRSAKAAQTIVCFQHSVLIRFAPYMRYIEKKVLEVLPKKYYIHSGKGLEELNQWVCDNKFHGICTESDCEAFDASQDQYIMAFEIALMEYLGLPRSLINDYKYIKTHLGCKMGALAIMRFSGEASTFLFNTLANMLFTFLRYDLNGQESICFAGDDMCANRRLRVNLKHEDFLGKLKLKAKVAFTKRPTFCGWNLTHFGIYKKPQLVFERMCIAKETNNLHNCIDNYAIEISFAYVKGELAVCHMDKEELDAFYNCVRVVVKSKHLLKSNVRELFKNEVET

SEQ ID NO: 656 - protein, 1924 aa, Shallot latent virus
MALTYRSPVEEVLTSFTTSEQSEIARGAVQGLLKLEEFNHNLFNFALSPIAKQRLCSSGIYLSPFSYVPHSHPACKTLENYNLYQVVCPLVDHRFYLVGIKQSKLCFLKSRNRKMDMVECINRMVTSRDKLRYGNDFVVQAGQSGTVKKNSRTVTFYPELASLVPHEIKFRSRALFLHDELHYWSKESLAIFLDQSSPELLLATVVIPPELLLKAKESMNKWCYEFEVKGPDLYFYPDGVRAEGYIQPAGCVYLLTTNKMITPGGQVYCFDIISSKFAHHVIAITRGEALVKKENSFSNFEAIGSSFASKLLHDDYPCFPISYEVVMKLYTYLSSLNSPDVKSAVAKLRQLVEHPTAFEVQFTIEFANLYIRCGVNLDIFTPSTKTLLLKSLAVLMPALLTKYSKKLMRVSFTSFVSHLKPLSFNVKCETIDLKIQAKPCYDRIIPPVIDTLLNRLELGKTFFGNETFSRTPAPYNFVLNETCHLHGAPEELLMANMKFLGDLESFTFSSTDQVLAGAATVFRPLYQFLFSTLGDYCVDYCLMQAVRKQRVEKNETTASKVLALPWFTNESYGEERMYPAPVFNCLEHEDENWGAAEEFDDVEPMLLNLFDCVCGTGIQWTVAFHVELLNVSMNDRLSNRSAAFYSKGSFGYTYNGGQHIGHEWLDEFDSFLAINGHDLNYFNCVLFQRYDGGNGIGFHSDNEELFEKNSRILTVCIQGDCEFRFRCATGETGFYMEAPKQFMMPEGFQESHKHAVRGCSPGRISATFRRAKISPVDKCVTPENEKLDSECSADDGSESECFSFIDNLGVSHTVQKSVNISPFVVRKVSGENNMCFWNCLSFLLNLDASLLKNTLSKGLEKLRGVAMHATLAEQLAPGAMAEDDVISLSCQIFSLEIVVHSLSLGCTTTFATEDAEKRIDILHDNEHFSLLFYKNDCFVSAVAQTFSRDTNEMYRVLAHKKFEELTELLRLGCGLTLEDLEVGFKLLNIKAHIKKDGEYLQINDSGEINGFYSLTDEHLVSCPPFSKNLFATKTILNSNEHLAVTAIKMLQEVGSELIYNASLDRASNFERSLLKGCTGIRSSTLFAGLSSRLKEGHEDHERPLTTVLGTFGAGKTSLIKRAVVNFKKSGRVVHFVSPRRSLADTLIQSLGLTEKQSAGADGKNGGKRKGKKNSQNTFVRTFETFLIQNARVGGNDLVFFDEIQLFPPGYLDYASMLLPDTVQFFILGDPLQSDYDSMNDRHVFLGYESDIYNLLKGKEYKYNILSRRFSNKMFASRLPCSFKSECFTTEEPYIMLQGFGTNLDDIKNFSEVYLVASFVGKNFVKAHLGENVKVLTFGESTGLTFERGSVFITESALKTSECRWVTALSRFSRNLILINMLDITFESLANQRSTTVLGRFLKGTADPSHTLENLPGKPIAQYGFTHCVGRNLGVREAKLQGDPWLKSEIFLGQEDEMQEIEEVAEVVQKEIFKTHLPRCDLEGLRAQWNDKILSKEVREFKFRSLVTDQFTDCHSKQKGKILTNQAERFETIYPRHRASDTLTFLMAVKKRLRFSKPHLECAKLKEAEPYGKFLLDEFLKRIPLKPHHRHDLMSEALHEFEEKKVSKSAAIIENHANRSCSDWLADVGLVFSKSQICTKWDNRFRSAKAAQTIVCFQHSVLIRFAPYMRYIEKKVLEVLPKKYYIHSGKGLDELNQWVCDNKFHGICTESDYEAFDASQDQYIMAFEIALMEYLGLPRSLINDYKYIKTHLGCKMGALAIMRFSGEASTFLFNTLANMLFTFLRYDLNGHESICFAGDDMCANYRLRINLKHEDFLGKLKLKAKVAFTKRPTFCGWNLTHFGIYKKPQLVFERMCIAKETNNLHNCIDNYAIEISFAYVKGELAVCHMDKEELDAFYNCVRVVVKSKHLLKSNVRELFQNEVET

SEQ ID NO: 657 - protein, 1960 aa, Yam latent virus
MALTYRTPMEDIVIAFEPQTQALIASSAAQIYKKMEEGNCSFFNFHLPAIAKRKLSQAGIYLSPFSAVVHSHPVCKTLENHLLYTVLPNYVNSKFFFVGIKERKLQLLKSRSGALESVQCINRFVTSADKLRYTNDFVCYQSRASDELFKHNPGLAEPALRSLVEPLRRHKARYLFFHDELHYWNSKTLASFLQVMEPEVVLATIVYPPELLFKQKKSLNEWCYTFEILGDSLMFYPDGVRSEGYQQPLIGGYLLECNKIVLRDGTTYMVDILCSKYAHHLVAITRGEAESVKNRSFGPFEATASKTLARLCPEYPICLPISCEVVNKVYRYLRTLKKPDVQSAMAKLSQIVAEPTGQEIDFIEDFSKLVIQNESFNLSIAPERLKVFVGTWLGWLPGVLSDKMPSVQALSLGDFIKGLEPFNFTVKLRTLRWDTLYADVLNWSLEGEGDPELVVRQLDRKWVNAPYEAMPQRVSAPYFGMVELIDAPWKPLLEGLEELLLPFVRRAFLNSQCNQFTRTISRAAVSTYVLRLTERCSILRRKVRVGRESRACTPAELLGLGDMAQLTRQLVVRLQQRARFTFWELGISWFVRFDTLNVRYLSDVPMYAKAHKDTMRMMGEVVKDILKKGPRWKIDAPKRYACRGEVKVVDAPSDAAGKEEKGEDFKCLCGLVMPVTKLEYPELSLGAPDSLRGRKAGWYCKTGQVYRYNGDVHDAQGWPEELMLWCEANSIPPMYDCCLYQIYDEEASIGYYADDEELFEVGSSVLTVNLHGTAQFSIKCAKGSISRHLAGPTMFTMPQDFQLSHKHSVHGCSSGRISLTFRCLRKDLATGGVSDRMIEKLEVEESAQQVVELGGVGITLRERDPTSKYVVRQVPGDGSCFWHALGELLDASPNELKRACTKYEFADPALNVELHECAKDGAYVTDAGIIAACLCLQARIVVWKEEVGQIQEFVPQSSTCVLNLRLIGEHFEPIYIKNGCVISSIGLAMGRKECEVLEVLQRRCDDQILKEVWAGEGLSPSTMELVFKCFDVAAHVEEKGQVSLYNPEGSAQVSFTLEDGHLSFNPRKKDPSTMMRSGTTCQKLFPSATLNVLKQNATMITYRPDATRAGLLADSLHDACTGVLGSALFNNKCNLRTQFCSVDGELVIHMIVGTFGSGKSTIFRELMKRAHGKIFDYVSPRRALAEDFKKLIGMSCGQAGGKRKVGQENWTVSTFEKFLERVPFLVEGQVLVIDELQLYPPGYIDLVLMCKKVDVELFLVGDPIQSDYDSEKDRVALAPLEENCEVLLRGTTYKYNITSKRFRNSNFIGRLPCTILADECTIDEPYELRLYIENLKEIEEKYQKVVLVSAFDEKMAVQAYLPKARVLTFGESTGLTFPYGTILITAISERVNDRRWITALSRFSLNLCFVNCSGMSYEQLAMKYRGRALGKFLCKGATKEDLLGELPGEPQFISSFECKIGRDEGVREEKVAGDPWLKTMVQLMQSPDVQEEEIVEAVVSDEWFRTHLPRDELESVRASWVHKILAKESREVRIGDMVSNQFTDDHSNQVGGRQLTNAAERFETIYPRHRANDTVTFIMAVKKRLSFSNPARERGKLSRALPFGKALLNKFLQHVPLRPAHNHRMMEEALWEFEEKKLSKSAATIENHSGRSCRDWPIDMAMLFSKSQLCTKFENRFRVAKAAQSIVCFQHAVLCRFAPYMRYIEKKVHEVLPSRFYIHSGKGLDELNDWVIRGKFDGLCTESDYEAFDASQDEFIMAFELELMKFLGVPHGVIEDYKFIKTSLGSKLGNFAIMRFSGEASTFLFNTLANMLFTFMRYDIKGNEFICFAGDDMCASKALSVVNTHKSFLDKLKLKAKVQVTSKPTFCGWHLCPDGIYKKPQLVLERMCIAMELNNLANCIDNYSIEVGFAYKLGERAVNRMDEEEVSAFYNCVRIIVRNKHLLKSEVRSVFEESKELLTM

SEQ ID NO: 658 - protein, 2002 aa, Actinidia seed borne latent virus
MASIAVRTPYESFFAANSKDDQRLLLNSGLEFVKRELDAVGVHFAYQLSSQKKEALTSMGVSLHPVPFLSHSHPFCKTVENHMLLNVLPDLMGNGKWIFSSIKKRKIDTITKKRGVQASNVDFVNKVICAKDFTRYDFDPKVHDVRTNMSSREFIFPNSYIRACHNNKIFIHDEIHHWSADDMIYFLNNSNPKMLICSVVYPPELLRGIKQPQNPSLYSFEVDEKKQKLFFFPDNCKSEAYEQPLRLDWLFEAAYIDTGVKRYTVKLIKSAYSHHMFQITPGEYVTESRRFFNDFDTIDLSIMHENRFRYYDYIPIKKTHLQKVYSYLLCLKKPDVESGLAKLRQMFDDDQDCRVVEFFSKFCKDIIEKHKNKWELYGFSWLETAKDSFIKSLPIQIARCFKRWEFKNIFDFLFNLQTLSVSVNTRVVTRTFVSSFTDYICEEVKENQSVDALMNSKWHGIGPEKTQKWNIRVMKMHAFEEFRNGSVKRISVLLFLGFEAERMRKELNLKKKKKGEAHTLKLLKYTRDGPFIPPKWLFEGEDEKEKKKNKDKEDIGIEEKEFIKVNLVTSGWYVKVDLLTMIREEEEVGKKVENNEISILKSKKEEEKEKSIVHWPTDAKSTEKEGKKREEIEVGSPHEEVEKGKKKIVQECPNEIAPRSDNEDLRVFITREDLKNGCEITIMDHDAHPMKKRRIAKVVGDGNCFYRALRLCLGHGEHEYNVTREKLHKSALSSTFFRLEDDILHELITDGVYTSDELVKFIVNLANIELRISTQNQLNHFSSYKPLIAKYENEPVCVVHMHLENEHFDAVLYAHDEDGYDQEEEGGVIELKRGNFEDLEKLNFQNYKPTKLKGRKAFFFVNNLDIDYGHDKVRYKSNLYDIESICPKDLYNGYNACLVQIFEEGGNIPMHRDDEICYDDESILSINLKGSATFSYSDGNVTKDIRMMESSYIVMDGPFQKKFKHSVKNCSSGRINVTFRRHIRRMNMEPLVDINKEIKAMKNRCMIDAIADNEGRSIPVVMNALLKKDRIFWDEWRKNDNGGTISDLIKAANDLAFSFEVDTMDGVKTLNNKGPLFTFELKDGHFRKSKIEKIGKVMTELERREMKRETEGSFGDKVVELVSNSPGFNKLTFEVDVEYVMKIVHSFKNRMTGIALSDIYSNGESIFGEVIEEISRINKSSCSDKKKKDGSYESEHMTRKIELNCVIGLGGSGKSNSLQSFLKKNVKGKFLVISPRLNLASDWISKVGCNPNKVRTFETALRTNLKSIEVIIVDELTLFPNGYLDLLMCMLGKEVKRKKIVCIFDIYQSRYHSESDTNILGQVHDVDRIVKNKEISYLHQSYRFISNFFDSFFKDVTINKKVEEKFEVRVYDCHLKAQIIEEEKGRKIDAILVASRDEKNALSGKVEVMTFGESQGLSFNRVAIVLSENSEKQDEYRWMVALTRARISICFIVIYRGGLSVFLQNCGNKLIGAFIKGQECSLRRLRMMSVAKEITFKKEMIGGKSDEVDREERLEGDPFLKPFIFLGMRINSEEPEMCEVEIVEPKGKSHICIAQENFALSRNFDLIRSKELREYRFRESTTNQFCDNYERVGTGASKHTAGPLRFESIYPRHQSNDDLTFWMAVHKRLKFSNEAKERAKLKESSMVGQLLYYNLKEKLNLSFSHDPGLLSQCINDFEVKKLSKSKATIANHSIRSDMDWPMNQIFLFMKSQLCTKYEKQYCDAKAGQTLACFQHMVLVKFAPYCRYMEAMIRSRLPDEIYIHSNKNFNELNDWVVKHFKGETCVESDYEAFDASQDEYIVSFEIAMMEDMGMPNWFINDYIDLKCTLGCKLGHFAIMRFTGEFCTFLFNTLANMAFTFCRYDWRKGQPIAFAGDDMCSLSNLEVSNKFDSIFEKLSLQAKVIRTETPMFCGWRLSKYGIVKEPELVFNRFMIAKERGNVDECLENYAIEVSYAYSLGERLFEVLKSEEQIEYHQCVVRFIIQRLEKIKTKVKDLFSDQRDV

SEQ ID NO: 659 - protein, 1419 aa, Fig latent virus 1
ATCAYHFNRNVPMIRKLLGVALKSRLGIRLYRARSIVRAVCWNFALARGRQDHMLDQASDSLVVSILTSHKDVSDYFFFRDIPRRVWVVRDLCARIQKGMDGWASIPLKKTIQDWLCDHSLGLCERLNLVDDFERKLMRLKDIELDLDLEPFIRKPESVLESFDSLWGLDAPSSTLDRPAEPYTGYFISLRYRVDLRGFLERVERYMHRRSNPTFAGHLGPILPICYPMPDKVMAEAVTVSSTEPTEPELDTSQPPRDRIPYPSLMRRLHRPAFILQPDYPPHRSGSWRVAPSSKRCFSYGHAPSITESRVADALEEIFMRPMAQSMLYQVYDQDASIGFHADDEECYDLSDNPVLTINTKGFAKFMCRDDRGEVSFDLVPGSCLLMPNDYQTRGKHSVRSCSAGRTSTTFRIQRRDVPKGKVSKGLTNDQPAPKEQLTQQDFENLSLDDQVSLCMPYSCFFKCLASEKDDVSAILLQCSEYLWSVYQNRGTSVATALRICKDMGYSVQILEGLKITKSDSEGLLKIKLENGHYELVKDFSAFDSLTQNKKKKRESSGAKLDLGSLKVSDGFYSQISFKALKVAAEKLVVSLLDGTSGIISQGVRGEGFRIVPGAKSEQTALDIIRRAEDTTKDIVTILGFAGSGKSHGLQQRINAEGKPQGILLLSPRRQLMEDWVKKCPKLSCKTFEAGLKDDLRAYGCVVLDELSLFPNGYLDLLIIKANLLGHQKLQIVVVGDPIQARYYSKDDQHRLYKEHEIDRLGEVNYGLWTHRLPSRLADKLSVETTSECPGTEVVVHNSLPEARAAARKKNQEIEVILCASREEKKSFEDNTLTFGESQGLTFDFGLISLSEEARLSSDQQILVAVTRFRKGFGFIYNAKGDYKIFARNCKGLLLRILGKPKVSIDYLMNMTKSKLKINKLGGVGAGLDERDRELRLAGDPWLKGQIFLGQRVNMVSETEALVEEQLSTHKIHLPISTEKLITLNMGFSKSKYCREIKTRSGASNQILEEDRGRGSTDLPQPCLVESRYLNHSSKDDVTFWAAVVKRLRFAKPEKNYRKYLLAKHRGDAMLRAFLELVPLKPIQSNLLLSEAEADFEEKKLQKSAAMDSLPFNRSDPDAAADLVKVLFEKPAFAQIWKRFVLAKAGQTIACFHHRILLRFAPMCRYIEKVFSLQCPSNIYVHQKKNFDVLEAFVRDHFSGDLCVESDYEAFDTSQDASTLAFEVALMEHLKIPSHYIDDYIVMKTTLGCKMGSLAIMRFTGEFCTFLFNTFANISFTSMRYVIPRGTPLLFAGDDMCALRNLKLRSEYNDTLDKLTLRAKVCRTSKPLFCGWRLTKWGLYKEPILVLERLLISIERGTLTDTINSYFLEFKYAYDKGGNLEDIMDEGQLDAHHRCVRIFLRHQNLLHDLNYSTLHEGLD

SEQ ID NO: 660 - protein, 1648 aa, Arracacha latent virus V
LSSIGVHTSVNSFRCHSHPISKMLENHILVNVFSHYLKKKNLFVSCRNSKINAVLKNSKANVSYEHYNRFVHAKDPLRYTEFIKELDYSFMPALVRKGNGAEVCFIHDEVHYWSIENFQDFLGHLECEQVIYSIVYPVEIQMGVPFSLNPHLYEFEDEGEGTFRWFPDGKASGSYVQPINPWLLTTSKTEDSRLRGWSITKLESFGAHHVFLATRGICTNDKRDCYNDFACINPLSFCSKVSRGMRRIRSSLAKEVFTYLLALRKPEPQSAVAKIRQMSKGNIMEDEVMFLGLVARKLQGMNVFSEKKNTSINEFSVIELFTDVLISCLGEKASLFLFHKKKIASDLQGLLGFLSPAEFKIQKVFRERKTKSIKYRISNAVLSESVMDEELGGDIQLNEIRCGGRDSASYSATKEELLLPRIDIGLVEFMTYVKRLRDFFLNPPAAYESSTMFYADMVEPMKRCYVWISKDWGLVKQVRLIAGINDEDSLRGGLITADEYLRRKEPKVATKEESPEIRSLKLEKPQLGGVSCECKMSFETGNYRGKGLDLVDGDKLKNREAWFYSRGGESYTYTGATHKSRGWPKELNEIIGSLGFKAESFNHCLIQRYKGGAELKMHKDNEPCYPSKNSILTWNQHGSCTFSVQCNKGSVQLGLEEGDHIMMPQGCQESHRHGVNGCSEGRISYTFRSTEEHDVNGPLRVLDEDSDGSISSYEECDEEEDTAIGGLEKGRKVCALNALSAHLGLNHETIIAKVLGEDKRAALALKSGGISLSTLLRCCKALNLSGCVHSEFGGFRMNGVIKEINMYIENDHVELSDRVCTSRGLRSAMLLNPETSPVTFSAKKEYAKNLVNAFTAYETGVIIKERLSNVHLESKIHELMMSCGFAGSGKSHYVQTVLSFESAPQTLIISPRKALKLDWQKKVHKKHVCETYEKALLSLHRFKNVVVDEIDLFPEGYLDFLLCASDWECVVILGDPLQAQYYNQDDRLKLGGIPDMFSRIKGKINYLMYSYRLPANQELFEINCYGDGNAKSKKSDAQVLVCAREGLVGREKAYTVGESQGLSFQDVKLVEDKGLRHIKNGTMMVAMTRSRNSFMVDAKKTQGCSFLNAVQSGRRITNAELKLELSQRLSEFSCILSPYLVSNMESIEEKLANDPYLLSLGNLCFDDEPDEEEIADEWCAEEAMRTHLFISEESNTLYSSTLKSKEDREHVSEHTGASDQIDEIGSTREHTMVGPLSYRSRYLDHKHADDTTFFMSVKKRLRFADYERNKKSYERKICYGEQMFQKMKEFLSLPDSPWVSPLEASEQEFIEKRAKKASKLIAAHQDRSDPDWPSNYVKIFLKQQLCTKMEKRGADAKAGQLIACFSHSVLYRFGAIIRQSEKTMSHLLPANWLIFTQKRYEDLDEWCKEHMNEQVGTDSDYEAFDQSQDGTILAFEVALLRYLHWPEELVEEYKELKMMIGCKLGSLQVMRFSGEFGTFFLNTCCNIAYTIMRYEITPETPIAFAGDDMFSPRVLTVSHAYDHFIENKSIIKLVAKVRISSDPLFCGWRMTVYGIIKDPNLLLDRWKAAIEKGNLKECMDNYALEASFGYRVGDNLYDLDIDLDAQSELTRRIIKHKHQLSRGVAEIFSGGGDVASDEEDEWKYLFGA

SEQ ID NO: 661 - protein, 1989 aa, Actinidia seed-borne latent like virus
MASIAVRTPYESFFAANSKDDQRLLLNSGLEFVKRDLDTMGVHFAYQLSSQKKEALTGMGVSLHPVPFLSHSHPFCKTVENHILLNILPDLMGNGKWIFSSIKKRKIDTIVKKRGVQASNVDFVNKVICAKDFTRYDFDPKIHDVRTNMSSRDFIFPNSYIKACHNNKIFIHDEIHHWSVDDMIFFLNSSNPKMLICSVVYPPELLRGIKQPQNPTLYSFEVDEKKKKLFFFPDNCKSEAYEQPLRLDWLFEAAYIDTGVKRYTVKLIKSAYAHHVFQITPGEYVTESKRFFNDFDTVDLSIIHENRFKYYDYIPIKRSHLQKVYSYLLCLKKPDVESGLAKLRQMFDEEQDCRVVEFFSKFCKDIIEKHKNKLEIYGFGWLEAVKDSFIKNLPINMARCFRRWEFKNIFDFLFNLKTLSISVETRVVTRTFTSSFIDYICEEVKGDQSVDAIMNTKWHGTEPEKIQKWSTRVMKMQCYESYRNGAVKRISVLLFLNFEAQRFKRELASKLDGRTPQIKLLKYTREGPFLPPKWLFEEECSKKKREGEKKKSLKDNPEEIVKVNLVTSGWYVKVDLSTFLRGHEEGKKEEKHHPEEEGGKGKTSKENLKDGGEYRKREEEKDKPQRKKGDVKSEEGQKGSISGYNEGSLRGEDERILITRELLMDSCEITISSESVISEKGCKRIIKVVGDGNCFYRALRVCLGHDEEGYSITKEKLHKSASKSEFFRLDNELIDELITEGVYTSDELVKFIVNLANIELRVSTGGYLDSFSSYKPKLAKYDNGPVSIVHMHLENEHFDAVVYSPMQEDDSTLADEGDIILKEGSFEALSLLKFEGFKVTQLASRKAFFLVSNLDIDYGHNKIRYKSNLYDIEQLCPKELYKGYNACLIQIFEEGGSIGMHKDDEVCYDNGSILSINLRGSAIFSYSDGKREVDIPMHEMSYLVMDSAFQRKNRHSVKGCSKGRINVTFRRHTRRMNMEPLIDICEEVKAMKNRCMIDAIAENEGRSNIMVMNALLKKDRPFWDEWRGNDNGGTISDLIKAATDLNFSFEIDTADGIRTFNNKGPMFMFELRNNHFKSSKLDKIGKVMTELEKRKQESAVESSFGEDVIRLISNSPGFNKYEFEIDIEYVMKIIHSFRNRMTGVALSDMYSNGESIFEEVIKKINKCVNATRERKNKGEAQERFNQVVEINCVIGLGGSGKSNSIQRFLKVRRRGKFIVISPRLNLANDWIEKTGCCPEKVRTFETALRVNLKKVEVIIIDELTLFPNGYLDLLICMLGDEIKKKKIVCIFDIYQARYHSDSDVNLIGQVHEVDRMIKGKEVNYLHQSYRFISNFFDTFFKGIAINKRVKEDFEVRVYDCHLKAQIIEAEKGREINAILVASRDEKKVLSGKVDVMTFGESQGLSFDRVAIVLSENSEKQDEYRWMVALTRARISVCFIIIYRGGLSVFLQNCENKLIGAFIKGQECSLRRLRMMSVAKEISFNKEMIGGKSDEVDREERLEGDPFLKPFIFLGMRINSEEPEMCEVEVVEPKGKSHICIAQENFALSRNFDLIRSKELREYRFKDSTTNQFCDSYERVGTGASKHTAGPLRFESIYPRHQSNDDLTFWMAVHKRLKFSNEAKERAKLKESSMIGQLLYYNLKEKLDLNFSHDPGLLSQCINDFEVKKLSKSKATITNHSIRSDKDWPLNQIFLFMKSQLCTKYEKQYCDAKAGQTLACFQHMVLVKFAPYCRYMEAMIRSRLPDEIYIHSNKNFNELNDWVVKHFKNEICVESDYEAFDASQDEYIVSFEIAMMEDMGMPTWFINDYIDLKCTLGCKLGHFAIMRFTGEFCTFLFNTLANMAFTFCRYDWKKGQPIAFAGDDMCSLSNLEVSDKFDSVFEKLSLQAKVIRTDTPMFCGWRLSKYGIVKEPELVFNRFMIAKERGNVDECLENYAIEVSYAYSLGERLFEVLKSEEQIEYHQCVVRFIIQRLEKIRTKVKDLFSDQKDV

SEQ ID NO: 662 - protein, 2090 aa, Zhejiang betaflexivirus 1
MSLTFRSPAEEALSSFSSVEQSQITRKALATFISIEEREHTFFNYAVKIHAKERLTNAGIYLSPVSPIPHSHPVCKILENYLLYKVLPSVIDNSFFFVGMKDNKFAAFKTREPKLDMITCINRFVTSHDKNRYFGWRSAKCSVSEFNTTVDKSPCLKDLVPQVLSQRARNIFLHDEIHYWSRRELITFLEVAKPERVLATLVFPPEILAGSKVSLNRWCYEYEVRECGRNSANGLFNFRAAFRGDSGKTLFFYPDGVRAEGYEQPLDSGYLLKTRSIVCNDGTVYNVDIVCSKFAHHLVSITRGNFVGRSSRSFGDFEAITTRGLSKVSSNMKDAYPICYTTVNRIYRYLRSLVKPDVQSAVSKLSQTVGEPTGAEIKFVEEFSKLVISTHSVNNLIGKDDFKVLQGLVAGTLPRMFAQKFKEFRAISLDEFICELAPYSFNVDLVDLKGDTCLDFIFYDVTYGSVTKDPAVLMEKVFTEGSERVRLNGLYHCDEPHTHVLELSGAATTRLFSRFIRAYLGNLQHQYSVENLRECISNFKRWFKSSKILGLSFYSMEEEDASRIYRRVRAGKFIRREVMFQRDGLIWFLNRNIKGSGKWYSGNTKFITGDDRGIAKMDVDVLCTYRRLLTELTNASQKLVQLEIGEDSPCLLNKPTTQGGVSEALEAPKDDETGNKPTLGVTFPEATTEPRGENVGEEVAFRDEVTRRIKEMMNARAAIISVVNFEGLKIPIYKLRTLGPLAFNLTDDLGNRVASWYTKGKPVAYRYKGGSHESKIWLDMFNNLLIFNGLPTDYYDSVLVQEYKAGGGINFHKDDEEIFERGAKVLTVNLYGQCYFSFSSPKETVSFELLEDSYFEMPQDFQEKYYHGVQGCSVGRISMTFRRLSCDKQSGVVKPQSTALVEPSDHPTETQGNDKVNNEVRDTETSGSSEGSGDDATEVSQFGFDKHKLANINLVVKKYCESEMSRMLLSKKVVAECNYEGLNRICACELGLNEQYVKEKADHFMQVLPIKSAEMISDFISDYNLDACLYNLMGAIKMFNLQVVLFIPGHCLTIQVEGNNGKVIELAWEVSTQSLKLLRCANDCCIRAVADALERPAEQVIEVLRCKGGIELMEEVTSGQGLELEHFEQVLTLFDICGVCFGDFDTVLNEGGRLLFYFYIEDGHVEHFVKNRSSSKDKIEALKNREDLLDLKRQDGVIGARGGSKFNLRRGRKGPDPKDNYILDLSAVKPASTSLKFVSTEQRFNLIKNSLLVGDTGVLFDKNFDKIGLLESREWNEWSGMIGVILGVYGCGKSTLFKKLVSKNPRAYIHIVSPRKALASEMKLALEESSDEQIRKRGHNTTVSTFERFVQRALQSKFKCDALLIDEIQLYPPGYLDLVVNLVKPKEGTVFLIGDPCQSDYDSLRDRLTFSNIKPDIEMLLEDREYKYNFLSRRFRNKNFIGRLNCVFDEGLMNFEEPYVICNNFEECRALTPKYHETFLVSSFEEKKVVAVEFPNCEQILTFGESTGRNFRYGTLVITGTSRYVNEKRWVTALSRFSHNLAFLNLTGYGIESVCQQYSGLALNRFLTEKAGPNELMESLPGKPVLTKGFTSRMGKDYQVKELKLQGDPWLKTMINLGQLEDFQEEEMSEVINQIESVKTHVPLSYLEGVRATWNDRFKAKEDREFKIKGLITDQFADEHSKNNGFKLTNAAERFAAIYPRHKSGDTATFLMGVRKRLRFSKPSVECAKYRDAACFGPFMLREFLKRVPIKPGRSSVFFEKAVQDFEEKKTAKSTATIENHSGRSNLDWKIDTGLVFMKSQNCTKFENRFRDAKAAQTIVCFHHIVLARFAPFIRYIEMKVNEALPKNYYIHSGKSLDELNNWVICNDFTRVCTESDYEAFDASQDAYILAFEVCLMEHLCLPKDLIEDYKYIKTHLGSKLGNFSIMRFSGEASTFLFNTIANMLFTFLKYDLNGSESICFAGDDMCANRRLRLKTEHDGFLSKLKLKAKVCFTSSPTFCGWNLSFYGIYKRPELVFERLCIAKENGNFRECLDNYAIELSYAYKLGEKVLPLMDESAVQSYYQCIRIIIQWKHLLKSKIALDFANSVKA

SEQ ID NO: 663 - protein, 1860 aa, Zhejiang betaflexivirus 2
MALTYRTPMEDIVSSFEPAMQSAIASKAALSYKELEEKNFQAFNFHLKAEAKQKLSAAGVYLSPFSAVVHSHPVCKTLENHILYSVLPNYVNNRFFFVGIKNSKINLLKSRNPKLSVISAINRYVTSKDVCRYSNDFVVRSSKEIAGLSRHKATLAEATLRDLVPNLLNIKAKHLFMHDELHYWREKDLITFLEVVGPEVLLATVVYPPELLVGSKQSLNPWCYDFDVKGNKLLFFPDGVRSEGYEQPLKGGYLLTAKEIHLPNGEVYCVDLLHSKYAHHLISITKGAAVTCDYRSFDGFEAVAFGGLVNLSSSSNPFFPVSFDLVSKMYRYLRSLKKPDSQSAMAKLSQIVPEPSASEIKFVQEFADLVVNCGNVNSLLSVSRLRLFLCRVYQKVFPAWYLDKISSIKELCLDDFIRQLKPFSFTKKTKIINLNYLEDMLDWSEFDSEDGKDLHKVVDEGFFYNTVLGDSKSSIELRFSQPYIGLAPLSDSATEGRIKFSVPRDALVKGLTKIIMNSLADQSLWGINHIQVKAALTSLLENRSILLNSGVCFQEDLINSIVSLINAKTVRLATKVRFRFDWGWFMAFKCHRLNTRFLTNYSESWVLPKATSAAWSSIVNELNRQSFKLHPTQSGNSNSLKGVNFNEGSDGRDNAASTSGDQEINSQLELLNVDASILDQFGLADLTPEMLKSAGLSVPKKANLAVFNPEVAECGEEEIKTDSSESSTNLLEITEGEDVEQLKGKEQRKVIGRVSLKIDDMQNYNVLQEDTDLLNLISKDLGYMRSEVSKRLDSLGLFNLDSALSNEDQIFGVIESANLLFSLNLIIILSDFQSGGWKLLAIESGDPNEICKTLWIQEDGGSFKKVIPKNLCVVHAVSKALRRRPDEVINVLSQKDYRDLFSDLMQGKGLELTRLEFIFDIFSIHAFVQIGSELIEVNKEGNCCACFDLKEQHLEYIGATLNQIGCKLTSGCNSKQEFERKTIMHLQSVGSEVIFKAKVSRAKLLADCLHSGNTGVISSELFNGKPHLLDPFLERNSNVLTEAIESGLERKVITVLGTFGVGKSSLFKQMTTGARGQTFDFVSPRKALLEEIKCDLKVGEDAKARKRRGQQNWFFNTFEKFLNRCGKLKEYQLVFIDEIQLFPSGYLDLLSFLIQVPISLVVFGDPCQSDYDSEKDRDFLGTISNNVEALLKNRDYKYNILSHRFQNGNFLGRLPCLMNEERFGQNNLNYLIYNDLDDLAHLPLEYEQVILVSSFEEKRVVKSYVPEAKKILTFGESTGLNFDYGTILITMISERSNERRWVTALSRFRKNLALVNSTGLSIDGLALVYKDRFLGRFLCGKADPEQLRVLLPGRPIFTEGFQTKVGRDEGIREEKLAGDPWLKSMVDLFQIEDCQIEEVQEIIQQVEDFKIHLPREEMEGTRTRWVHRILNKEFREVRMGTIVSDQFTDDHSKQRGGQQLTNAAERFETIYPRHRANDTVTFIMAVKKRLRFSKPHIEKAKLSSALPFGRFLLNKFLEFVPLKRMHNVAMMEAARQDFFDKKTSKSAATIENHSIRSCRDWLADIVQVFSKSQICTKFDNRFRVAKAAQSIACFQHSVLCRFAPYMRYIEKKLQEALPKRFYIHSGKSLEQLNAWVLTSGFDGLCTESDYEAFDASQDQYIVAFEVELMRYLGLPNDLIQDYLYIKTHLGSKLGNFAIMRFTGEASTFLFNTMASMLFTFLRYQIKGNENICFAGDDMCSSKKLIVSQEYDNFLKKIKLKAKVQHTSKPTFCGWHLSPDGIYKKPQLVFERMCIAKETNNLQNCIDSYAIEISYAYKMGERVTARMDEEELGAYYGCVRTIIKNKHLLKSEVKALYESLD

SEQ ID NO: 664 - protein, 2000 aa, Olive latent virus 3
MAASWTSFSSLLSNPLSLAQRILTPPHNPSIPSLPKSGFRSVTSLSDPSDALTRAQMFSPTKAILSPAASPTPASQPDPPAEPCSDPPTETTVPSSKRALLDSHSPSPVIPVDETAPISPPIRLTGSGLKDLVDFLNPTVHRDTIAAPLLETISQPLRDSLRTYPWSVPPSLQTHLQSLGINAHNFGYKPHPHPAHKVIETHLLHEHWRHLATQPSAILFMKPSKFQKLHNQNDNFTELHNYRLTSKDSTRYPETSRSIPNLPSIFLHDALMYFTPSQILDLFERSPALEKCFASLVCPPESNFTDISFYPELYRFRAVGDSITYELEGNPASSYTQPKSAIEWLKITTIKGPNFSLSITILESWGPCHSLLIQRGLLPLHQEHSTQAFKTPEAILLPAPSHLQQDLRHRLVPTRVYESIFVYVRAVRTLRVTDPSGYVRTQSSKPEYSWVTTAAWDNLANFALLTCAHRPRARYYLYWSTLDRLMGWIRAHKLALLTASTPLASLGLASSALLACRPFWMRLDSLQLLNRWVIKPSFPRNLPFLLPKAFQPKASLFKAEFLPRHAPSRILPEFFDALLKKAPFLRPLFSDAPIPSWAWALCATGVAIPIIALSIRRFLGPNSPQALLDEYQSYFHPKPWQLILEQGPIFANPEPFSPHCQPIPSSGPDSAPSSTLGTPPMYPSSPPAPVEEKTILVPTVRALPPAPPPSSVPPPSKPSPAAPAPVTPPSLPTPVIPPLSTPTPETRVPEVGKSGIVASDLPPTEISPNPTLARCRPNFLGLCAPHPNSNPSHPEPSAPSPLITDPSGSLTAINPTLEPFEFNHALLGADPSGQGPVAQFNELFPSTLWLQGTGEFLTRSRVQAPSSAPYPAMDCLLHAIHTATRIPKPTLWAGLCSNLPDSFLDPQLIAKHGLSTDHFAVLARLFSLRCTFQSRSGTQTMGVADATHTFRIRHTPPTEDAPGHFEYMEEIPESLTGAFAQDLAHFALSFRFNGYLLPFKHVHTYTSNVSRAKNLISNMKNGFDGVMASADPLHPGQTRERFLSMDNQLDIAVPRETRLIHISGFAGCGKTYPITQLLKKPVFRQFRVAVPTTELRSEWKDLLTLEPADRWRIGTWESSLLKSSRVLVIDEVYKMPRGYLDLRPTPLIRPIQFVIIPWRSPSQGEYNSTHPHSSNLRITSEIIHLQPYIDFYCFWSYRIPKNVAACLKVPTTSNKTGFIRRLNSIPNANKVLTCSQSSMKTLNQCGFSSVTIASSQGSTLQEAACIHLDRNSRNLSNSHSLVAITRSKSGIIFTGDFHLLDGTTSSNYLFSCLAQGKSVDLEMLFPKTFPPCPRLLQPIRSRRTILVGSSEDWAQFYRPTPLEDFSRFQATPVPETAIPCPNGYQGSPEMIEGPSHANLPFEADLDSIDPLEGETSPYSLGFGVHARTARTTNPEATGDIITQSEIVLGDGELNMPQVSTHFLPETRRPLHFDNPSALPSSTVPSPVDLSRTAFEPVYPGETFENIAGHFMGPRDPEVLEIIHNDQMSNQFPLLDQPFSLAAQPSSLMAAIHNSQNDPTLLPASIGKRLRFRPSNAPYPITAEDQILGSLLFEALCRAYRRHPEAVVPFNPIAFAECINLNEYAQLTSKTQAVIISNARRSDPDWRYSAVRIFSKTQHKVNDGSFFGSWKACQTLALMHDAVILLLGPVKKYQRLFDSEDRPSHIYIHAGHTPQDMSNWCQQNLTDSIHLTNDYTSFDQSQHGEAVVLEQMKMARLSIPQHLIDLHTHLKCNVSTQFGPLTCMRLTGEPGTYDDNSDYNLAVIHLQYAVGSTPCMVSGDDSLLDSKPPIRDEWTGIAPLLALRFKTELDRYSLFCGYFVGSSGAVRCPRALFAKIMIAVDDGSIPLKIASYLTEFSIGHSLGDEFWQLLPVEQVVFQSACFDFFCRNCPPAAKLLLRLGEAPQSILEATFGKLKWASNAVYSMLSATARHLLIKSRLTRPPPESVEVSQLQGQLLASFQH

SEQ ID NO: 665 - protein, 1831 aa, Andean potato latent virus
MSFQTALEALNSTVHRDAATNPILNSVVEPLQQSLVQYPWLLPKEVLPFLLSSGIPNSGLGTTPHPHPTHKVIETFLLYNHWSCLANQPSTIMFMKPQKFQKLRNLNNNFTHLCNYRLTPADTTRYPTTSLHLPNTPVVFMHDALMYFNPAQILDLFLNSPIINSLYCSLIVPPESDFTDLSLQPILYQFSISGQTLHYVPEGHNAGSYNQPLHALDWLKIHSILSRELNLSVTKLDSWGPVHSILIQRNLPPLHPARQSPINHSLSSLFPQHNRAPRALRSQRDSSQHLQSALQALFPPPQAAHALASFKIPECLELPSATFLNQPLRHRLVPLQVYNALFTYTRAVRTLRTSDPAGFVRTQSNKAEYSWVTPNAWDNLQTFALMNAPIRPRVFYEFFLNPFQKLKLHFRQHWKKYLTLFSPVISILVISPQLLPIKSPIPKLQLVSIFRSQKLPFSHIKLENPLYLKKFLPPKLTQRRNFSIPIPIALGNILLHLHKINPSLAPVPPILPRFQTIPVLLRDLPPRASTTIPLLALVPTCIISWLHLFSALPLQQIHDLYHTNMHPSQFRLQWDLQPMHVDSPQPFLPYLLPAPTNPSTFPQTPLPVTPPISPPQAQRATPPPAPSPSPSSPAESEPPIGLVSSSTLPPSSTTHQTPPPLPNLSDDLLQVIPPSSDTPPSIPPDSTVTYTGALNHSISPTPFVPQHLPAEPIIPPLMADPTCAGDVIPFHNAFPGLYFSNTASFPTRIRILPSSNLPVPALNCLLETFSQLTHYPVLSLWQSLCSMLPDCLLDNEEIRTVGLSTDLLTALCFTYHIQCILHTPSGNHPYGMPASSTSIEIDYLPGPPRHFSPHNRFIASAPGSNPSSEPLVREALRFKHNGHFLPFHQAHLHSVSLQHAKNLISNMKNGFDGIMHSISTSSSSSPSPKQQILTLDSICDVAQPRTVPVIHIAGFAGCGKTHPIQKLLASKPFKDFRISTPTNELRSEWKRDMDPSPSNLWRFSTWESSLFKHSSVLIIDEVYKLPRGYLDLSILADPNLKLVFILGDPLQGEYHSTNPHSSNIRLPSEIDRFRRYIDCYCWWTYRLPKLVAELFQIPTFSSEQGSIIAVSSHPPGSKNLVNSTSTATSLQQMGHHAITISSSQGITFPEINTILLDRHTNLLSPNNCLVAMTRSRKGFAFVGNLHLASNSFGTSYMFSQALARQPINMANCFHSFHQLLLLHHPITTRNLRFVAGHQSTLPNVHKAHQKLSTSGKLSLPPHIPIDHAEDFIITNPVVFGDAIDPRLPTNHLPPTRLPLHTELLGTNPSSTDSSSPDLLFNTPFSLGLSGETFENLAAHFLPAHDPSLKEILYHDQSSLQFPWLDRPFSLSCQPSSLIAATHSPSQDSTLLPASIKKRLRFRESDQPYQITANDQLLGQHLFSSLCKAYGRSPLSSVPFNPVLFAECISLNEYAQLSSKTRATIVANAQRSDPDWRHTTVKIFAKAQHKVNDGSIFGSWKACQTLALMHDYIILILGPVKKYQRVIDSKDRPPQLYIHCGHTPHQLSSWCQTHLSGQTYLANDYTSFDQSQHGEAVVLELLKMQRLNFPSFFLDLHLHLKTNVQTQFGPLTCMRLTGEPGTYDDNSDYNLAVIFSKYLIHSHPIMISGDDSVICGNPSIHPSWSSIEPILHLKFKTETNSHPLFCGYYVSPLGAVRNPFALFAKLMICIDDCTLDDKILSYLSEFSVGHTLGDSLIHVIPSAILPYQSACHDFFCRNCTPSQKLLLSLDPLPESTILRLILKIKWASKAFFSLLPSKARDLLVSKGSLQSMPFDPKVTQLESELLPFFNST

SEQ ID NO: 666 - protein, 1808 aa, Asclepias asymptomatic virus
MAFQLALDALSQTSHRDSSLHPVLDSVMEPMRNSLTTFPWMVPNDLQPFLLQAGIQTSGLGTTPHPHPVHKVLETNLLFNHWHFLAKTPSSVLFMKPEKFNKLQKRNPNFSELLNYRVTPNDSVRYPTTSPHLPKTDVVFMHDALMYYTPEQVLDVFLRIPNLQKLFCSLVVPPESEFTNLSLSPNLYTFQLHNQTLHYIPENHYAGSYNQPLSAIQWLKISSIHHPQIQLSVTILESWGPLHSILIQRGLPSQHLAGPNLFSSLLHPLPSPAADLISFKIPECIELPQSTFLSQPLRHRLIPKKAYDALFTYTRAVRTLRTSDPAGFVRTQSNKPEYSWVTSNAWDNLQTFALLNCAIRPNVVYNFLRNPFQKLKIYLSQHWRRIVAVSAPTLSFLTLLPHFLNWSLSLPKVKCISAFRHRFDQPPPQPLALQIFHKLVNHLPPQVLQTLSKVCQTLHLPSPLPPPRPGILPSFRISHSAYPIRFPTWLSLLACLVPELLVLGSKLTGDLSVQQQHDLYHHHLHPAQYHLQWERLPYSTTSRQNFLPFEPVATPSPPQAPLAQPPPKSRSTSPQHFTSPSWSSTQLSPHLSPLPTQPSSPPPDFINIPVSPSTTFRQPTTSFLTNSSPRTRSLYEYLLQYYHPGPPPLPQPASNGCHCEPCTQSEASSPTQNFPLQDPSSPYIVPPDPSTPIPEPPLLKDLSCTGPILSFQDLYPRNYYPNTALFLTRLRITPPKPLPLPPNDCLLQAISPSLSVSPSRLWLALQEIIPDCLLDNEEVHRLGLSTDLLTALCHYFNFKAEVISDGTSLHYGISDSPVQIQIIHTSGSPGHYSPPPKLTGATPPREPPHPLTEQLLRFKFKGAHLPFSKVHSYSSSVAHAKNLVSNMKNGFDGILSLVESNVKHAPGCSPRDKIIMLDRLLDNAAPRSVHLIHIAGFAGCGKTHPLQHLLRTKPFHNFRVSVPTTDLRNEWKKDMALPSSQSHRFNTWESSLFKHSNILVIDEIYKLPRGYLDLSIHSDPSISLIILLGDPLQGEYHSTSPHSSNHLLQSETERLSQFIDHYCWWTYRVPSHISDLFNVPSYNQSHGPFFGTVRLASSYSPGQHNLVNSMATSAAVNQLGYPSCTISSSQGMTFRKHVTILLDKHSRLLSPSNTLVALTRSTAGVEFLGDPMSLSGTNNSSDMFSRAMHQMPINLATCFPRIFHKLNLLREPIKHRSKRLLGSRPPSPIYLNPKKMHLPPHIPIDYALDYVLHNPHVFGSKDDPRLECNFLPPTRLALHSDLISANPSVPSLQPVDSDFRTPITPVYPGETFENLAAFFLPAHDPELKEILYKDQNSQQFPWFDRPFELSCQPSSLIAARHSPSQDPTLLPSSIKKRLRFRPSDNPHQFSADEIILGNHLFHSLCRAYNRNPNQTLPFNPSLFAECIALNDYAQLSSKTKSTIVANASRSDPDWRHTAVKIFAKSQHKVNDGSIFGPWKACQTLALMHDFVILSLGPVKKYQRLFDQADRPSHLYTHCGKTPQDLSLWCSAHLSHKTKVTNDYTAFDQSQHGESVILEALKMKRLSIPEHLILLHIHLKTNVSTQFGPLTCMRLTGEPGTYDDNTDYNIAVLYSQYNLQNTPVMVSGDDSLIDSKCPELLSWPTIQSKLHLRFKTETTDYPLFCGYYVGSSGAIRNPLALFAKLMIAIDDQSISEKRLSYITEFSVGHSLGDSFWDLLPSEIHPYQSACFDYFCRNSPPHEKSILHNLPFSPTALSTITSSIKWLSKSAFSALPMRIRRAAIEKSQLPSSHENPEVSRLESELLHNFQ

SEQ ID NO: 667 - protein, 1748 aa, Erysimum latent virus
MAFQLALDALSSTTHRDSISAPLLDSSVSQLQSSLELFPYTVPKELVPQLNRMGIQVSGLTSTPHPHAAHKTLELNLLFNHWAKSCNVDSAVVFMKPSKFFKLQEKNSHFKSLHNYRLHPHDSNRYPHPSTSLPTEKRFYIHDSLMYFTPHQISGLFESCPNLLSLYASLVVPPESSMTDLSLNPDLYRYSIHKSTLHYTPEGHSAGSYNQPVNALDWLKISAIQTPSLSLSVSVLESWGPLHSLLIERSSQTQNPDSQKIKDLISFQTPQALILPNPDSLAVPLRHRLVPQKTYDALFTYTRATRTLRTSDPAGFVRTQSNKPEFNWVTSQAWDNLQTYALLTASYRPPVSYTLHRSPLTKLKELLTRNALKLAAMASPALTLAIFTTMTALNTNSSKALSFSALKIHLLNPLTGPELLHFQTSVLQQKNSAPLSQAEAKQELDKSAVPAPSEHDSSASQSTSLSLSASSQLLSTEKHPGSELSSKAIPVSTSCPSASKQLAPPLTAESHSSVNALLRKFLGPNSPQSNLDNYNLHLHPESFTLGWKRRPLLLDSHSSFLPSSCLQPPASPSIAAAPHPLPPAQKPPRPPTTVPTPKPLASPSQTQAAQPATQSPPSIPQTAPVTSLLPAPLETDDSCAGPISTFQDLFPASYYPHTANFPCRSKIPGYLEAPYPPLDCMLVALSAQMPQSPQELWSALNTLMPLSALTSPSLRVLGLGTEELTALSYYYHFQAEIHSDNEIYRFGIQTASTKLCLIRDSGPPAHFTAPDPLRAGSPPSRSQTNENSLRRSLLGFRLNGNLLPIDQVHSFTSEPSRAKNLASNMKNGFDGILTTLAALSSLSSGPSPRDRIFTLDGICDFALPKTVDLIHLSGFAGCGKTHPIQQLLKTPHFHNFRVVTPTTNLRSEWKSDMALPAHHNWRFSTWESALLKHAEILVIDEIYKLPRGYLDLSLIADPTVKLVILLGDPLQGEYHSTSAHSSNLRLSSEIPRLLPFIDYYCYWSYRVPKCVAKLFSLPCFNPSEGFIKTTLDFFPSANNLVNSHSVVHISEACGWNAVTISSSQGCTFSDPAFIHLDRNTALLSPSNCLVALTRSRSGVYFKGDFTFLSSLSGSSRMFSLAYSGQPIHLPDFFPEIVFQLNMITAPLTKRSSSFRSGFQPNISSAPKIPAPPNLPCPPHIPTNYSKDVIVNNQALYGESLERRLSVLHLPPTRMTLHSDINITAPSSSSFQPSDEPVPSDHTAVYPGFDFFTLAAHFLPAHDPEVKEIELKDQTSQQFPWLNLDFHISCQTSSLISARHQPGSDSTLLPASLHKRLRFRPTAAPYQITPSDSFLGNCLYRSWCQVYRRDPNVRLPFNEALFLECIAVNDYAQLSSKTQATIVANASRSDPDWRHTFVKIFAKSQHKVNDGSIFGPWKACQTLALMHDYVILTLGPVKKYQRLFDQLERPSHIYYHAGNTPHDLRRWCSKHLETSHCTTNDYTAFDQSQHGEAVVFEVLKMRRLSIPENLISLHVHLKTNVETQFGPLTCMRLTGEPGTYDDNTDYNLAVLNLQYDLRKTPTLVSGDDSYLSGTLSPRSNWPFVKELLHLRLKPSSLIDGLFCGYYLGPQGCIRNPLALFAKLMIAEDDGSAFDKLPSYLTEFSIGHGLGDSLWQLLPSDLVLYQSACFDYFCRKATRSQKILLQPGLVDQETLDKIALSAKFISRPFYSMLSSHARSLISTKFKLDSSLTTLQDPMVEFELLPFSNVQ

SEQ ID NO: 668 - protein, 1747 aa, Bombyx mori latent virus
MAFTNLVDTLANTIHRDAITAPLVETAISNFRHKLQLYPYQVNSKLIPLLNQLGIGVTSYGTSPHPHAAHKAIETHLLFEHWNHLARVPSTVMYMKPEKFQKLQQLNPNFASLINFRHTPKDITRYPVSNPHPVETEVAFMHDALMFITPSQILGLFKDSPSMTSLYCSLIVPAEAAYGVPSLFPDLYSYTIKDDQLVYTLEGNATGNYTQPLRSLDWLRRSGISSGDLHLSVTLLESFVSVHSLLITRVPQPPPSGEHVFLTPPASLLPNPEGLELPIKSRLVPTEVYNSLFTYVRAVRTLRVTDPSGFVRTQRQKPEHSWVQSSAWDNLANFALLTCSARPSLEYGFCYSSYKLLSLWIVRTLRSISAYHTGSLLTIPILHHLSPYQLCYRTHTFRWLPTHLDFHKTLPSLIHRAFASITGRYITNSPEFPTSTFSINHLLQPFGKSLQKFPCHSLVIRPNPASFIVRCSTLLQRRWLLLGLSALTGVWAYYHLRRGNSPQEKSDAYLSYFHPDPWRLTIRTSNVMAIPHSFFPDSGYSTSSPSRPPSPHPIVIEQPSSNVSKHHQVQNQAYLTPAHPETPPSPSKQEIKSGETLATGFPNVATLSGPSEASKPDAPPTPLSSDPTAHGPILPHKELFGISSPDHECTFLNRKRLNVSMLPFPAQPCLLVAFAQASNSTPQRVWAHLCTLFPDSLLDGPLERSQGFSSEHLEALAWSLNYRVSYRHGEHLNTIGPDDAPLLSLIYTGDGSIGHWAADESPLSPPPSPIRGSAKTLNSFASTAIRFRDSHGNLLPFRQVHEYKLCKPRAKIWPQHENETDGVIQSSLRAASSDPTFFHRLDQRADFAPQVSVQLIHITGFPGCGKTFPVTQLLKTKAFKGQYRVAVPTTELRSEWKDHMKLPSSDAWRVSTWETSLMKSAPVLVIDEVYKMPRGFLDLALVADPALQFVILLGDPCQTVYSSVNPDSSNYRLISEVEHLKPYRDFYCHWTHRLPLRLARFFGVSTTNPQEGFIGRRDNPHKSYPILTSSQQTARVCAGTGHRALTFCSSQGSTFQAPAQIFVDSNVASVHVSATLVATTRSRSGVIFTGNHRLFQSRPGTAPLFEAMLNDQPFNFLNTFANELGGMELITSPIKERKTILRGGSYDFSAYRSYQKRHHRMTNFKFDPAHTRAPRSTSAKPLPANDTSDIIIFAPELFDLQSSAIPRLDTHHLPETRRPLHFDIPSSLPTKVDISSAEPTDTAIEPVYPGCDYKTVAALMMEPRDPDSLEIRHKGEFSNQFPWVDLPYENGAQTLSVIAPKHDSKYDPTLLSASIAKRLRFRPSFLPYRLSPSDEVLGTFLFSSLCRAYKRHPNHKVPFQPDLFVECINLNEYSQLSNKTQAVIQANANRSDPDWRYTAVRIFSKTQHKINEGSIFGPWKACQTLALMHDAIVLIFGPIKKYQRVFDSKDRPPNLFVYGGQTPYDLSRFASSHLKPLQIHVCNDYSAFDQSQHGEAVVLERKKMERLSIPSHLIDLHCYIKTNITSQFGPLTCMRLTGEPGTYDDNTDYNIAVIYSEYDITTQTVFVSGDDSLVSPPPPAHPDWDAVSPLLSLTFKKEFVRNGLFCGYYLGPAGAIRAPRALLAKLVLALDDRTLPDKIASYLSEFVVGHSLGDAFWTLLPADQVIYQSALFDFFCRECSKEQKLALKIGEVPEHLCQTMLSLGFSWLSRPLYALLDRTARLRLLARTRFAPLFSDPSVEGVLQLDF

SEQ ID NO: 669 - DNA, 4272 bp, Vanilla latent virus
  source 1..4272: mol_type = other DNA
ctgtacactactttggtaatggctacttcagtgagaaaactcttagatcaagtatcagacccttccaccaaagcagcttattccgagctgtgcttcaaacatgcccgtgatgcagccaccaaagcttcagccatagcacctttcgctgtctctgattctgaagcccttggactggaacgtatgggcatcactacctccccatttgctaccacatcccacacacatgctgcagacaagattattgaaaatgactgcctcagcatcatcggccactacttaccgaaaaacccagtcacactaatccagctcaaaaggagcaagttacatctattgggcagaggagctaattcagatcattttgccaactatagctacgaacccaaagacgtactaaggtatggcacagcaaatcctcattattgccccaaggttaccactgaatatgctgtgttggccgacacactgcacttcatgagcccacatcaactggtaaccctattccttaaaaattcaaaattacagatgctctttgccacactcgtactaccaatagaagcattgcacaaactaccaagtctcttcccagaaatataccgcttagagtatctcaaagatcattttgtatatatgccaggcggacatggcggagccgcatacgttcattcttatcacacattgcaatggcttagtaccgcccaaattggaacacacaccaataatatcctatcaatcggttccacagactttataacattggaaaagatagagacaaaagcagcacaccatatcatggtcgtgcagagaaggagaagtgccattccatggcctgtgccaccaatttgggtcttccacgcttcagatatggtcaaactgccacacattttctacccagctgaagccaacgtccaaaatgcatacccaaatacacttatcaaacgaatgcaagcgtattgcttctcagttaaagcagtatcactgcgagacatttttgctaagctgagacaagtcttagaaacctcagatttgcaaaaatactcaatgccagatttagtgcgacttgctaactacttgttgtttacgacgggcatgcaacaagtcagtgactacgactcattcctcacaaagggatggttagcccgtctgagttcccgaatccaaatgagaataaggcagatgctgcaaaacgtagtgggacaatcctcatacgcagcattactaagcgtattagatactatacccatgccattcattaccaagcccagggcagtacccgcagtaggtccagaatggttccatgaggagtacactgaaggaaaacctgagcatgacggtccagaaaactgctcacttgaagatatagaaatgctagctgagttggatcagactttaacaccccacactcaaactgaaacgaaggagccacaaagcccaaacggtcaaatcacaaaccaaaatacaaactcagctgcaacctcctcaaaaagaacaaattcagagaactcctcagaatcgcaaaggagagaattattcgacgaggaacaactaatagctgaaatgtgggcagaaattgaaactgtaccagacttaggatccagctccaaaattgaatcaagcataataaagacacccaccgaaaatggtggtgaacaaatgcccacttcagacttcgattcaaggactacagaaatactcaggatccatgggttcacagctctcaaacaacaaagtgacggaatctccccaatcatgccagtgtacttcaatgacaaaactgaccaactctgcaaatccaaaatccaaacgggatgccccttcatgagcatggctacagacattaaaagacatttctatgactacactattgacaatagaagaggacaagcttacatgtcagacgtcaagaacaaccttactggattagttctgcccaaattgtctagagaaacactccaagcgtgggtatctctcgcagaaaattcgaaacgcaccatacctctccttgtcatacatggtgcgggcggagctggaaagagccaaaaacttcaggagacactcagagctatcggagcagcaacagaagatgtcaatataatcctaccaactgtcaatcttctcaaagactggaaagacaaaatgaatcaaatggacacacgaaggttcatgactttcgagaaggcctttgaacgagaaggaaatcgaattgtcatctttgacgactatggcaaattaccagcaggtctcatagacgcctacctcagtatcaagcccacagtcagcatggttatcttaacaggagaccaacgccaatcgacataccacagcgctaataaagagtcgcaaagcgctcaactgcccactaacatagcccacttccgcaaatactgcgattattacatcaacgcaactcataggcaaccaaaacgattggctaatccaatccgagtccacgctcagagactacatggaggaagcgtgaagaaagaaaatctgatcaaaaatggacaaactgtcctagtgcccgcccaccgtacccaaatatcacttactgacttaggccgtccatctctcacatactctggatgccagggcctcaccctcccccacattaccattgcactagacagtgatacccctttatgctccgacgaagttctttacactgccttctcaagggcctcagagagcattaccttcgtcaatacctattcagagaatcctgactttttagcaaagttagacgcaaccccatacctcaaaactttgctatcaggagttagagaagacgaagaagctggttcagacttgaaaccggcagaacccgaagttcgcgaaccacaaatcaaaactcatctcccagtaaccaacactgacactttcttggaaagtaaagtggagaagacagaagataaggacactcgagaactttgggatgggtcagagaaaactaatctcgcccaaacacaagaccctgtaatccaaatgtttccccatcaacaggctaaagatgaagccctcttcaagctcactattcaacagagaattaaaactgcatcgcctgaagaaaatcgtaaggagttgagtcagacaatcaatgttggcaacttgctatttgaagcttacgcagactttatgaaagtacccaaagaaccccaaccatttgataaagcactttggattaattgtctgcaaacagcgcaacgaacttacttgagcaaacctactgccaacctccagcaaggagctaaccgacaagaccccgattttccagacaatgcaattgccttgttcaacaagtctcagtgggtcaagaagatggagaaagtgggcttcaaatttaaagcgggccaaaccatttcggccttcaaacaacaaacagttctcataaccacaactatggccttataccttcgcagacaacgtgaaagacaccaacctggtaacatattcatcatgtgtgagaaaacaccagaccaattcaatgacttcgtgatgaacaactggaattttgacaggccctcctacacctccgattactcacaatatgaccaaagtcaaaacgggcctttcctcaattttgaactcagaaaagctcggcatttcggagtgccagatgaggtattagaattttaccaacacgtcaaatgctacgcccaaacattcgttggtaatttagccatcatgaggctaagtggagaaggcccaacttttgatgccaatactgagtgcaacattgcatatgacgcactcagatttcaactcaatgaccaggttaatgcatgctatgcaggtgatgacctggtcagagatcaggtgtgtccagagaggtcttgctggaaatactgccatgagaaattcaatctggtagcaaaacccctcgcaactaacaagccggatttctgcggatacagacttacaaagtacggcatagttaaatcgccaatacaactgtaccaaagcttagagttagccatccggctaggcaaaactgaagaggtgaagaggagctacgcaattgactatttacaagcatatcgtctaggagacaaactcttcgaaatttttgacgagaaagaaatggaagctcatcaactcaccacgcgagttctcacaaagaaaggaatgaaggctccgtcagaaggggatcacatgccctcgtttcacataacatctgaccgcctcattcgcaatccccactatgctgaaatgcaggacacacagtcacacagaatttatacggaaaaaccaaatttcgtagagaatcacttcacttaa

SEQ ID NO: 670 - DNA, 4542 bp, Wineberry latent virus
  source 1..4542: mol_type = other DNA
atggctacccaagtgcgaagacttctcgaccaagtctcagacccatccacaaaagcagcatactccgagctatgcttctccagagctaaggacgcagctgccaaggcagccaccctagccccttttgcagtctcagatgcagaagctgtaacactggagcggctcggaataaccacttctccattcgccacaacctcccacacccacgcggcagacaagatattagagaatgattgtctagcgctcataggccactatctgccgaaagacccggtgaccttcattcaactcaagcgatctaagctgcacctactccaccggggacccgaccaagacgttctcacaaactactgccatgaacccaaggacgtcttgcggtacgggatcactaatccgcactcatgccctagaatccaaacgcaatacgcagtcctagctgacacactacattttatgtccacgatgcaactcgctgttctgttcaataagaaccccacactggacagactatttgcgacgctagttctgcccattgaggccctccacaaactcccatctttatttccggaggtctaccgactggagtattatgagaaccacttcgcatacatgcccggcggccacggtggtggtgcatacgtgcactcttacgccacactcaaatggctgtccaccggccaagtgggtactcacggacccgggctcatatcatttggcatcactgactatctgagcttagaaaagatagaaaccaaggccgcgcaccatgtgatgctgatccagagacgtcgcgccaaagtcccgtggcctctaccaccagtatgggtcttccaggcgtctgattatgtgcgcttacctcacatattctacccaccagaagctaacgtacgcaatacataccaagatgtcttcgtcaaaagattgcaggcgtactgcttctccgtcaaggcggtatctctccgggacatctttgcaaagatccgccaagtagtggaaactcaggagttgcggcggtattcaatggctgaccttatccgactagccaacttcctgctgttcaccactgcaatgcagcaggtgtgtgactaccaatcattcctcacgaaaggattcctagcccgactgagcgccagaatccaagctcgtatccgatctctcaccgagggtttcatgggccagtcctcttacgcagctctgttgagtgtggccgacaccatcccggtacccttcaccaccaaacccatatccaggccagcccaaggggaagattggtaccgcaaccctgaagagcaagatgaggggcccgaagaagaagaccacccagctagcccctccctggaggaccttgacctgctagcggagctttgggaaaatccaccccacaatgcggtggcgagagaaaacccggacaaagccacgagcccaacacctaccacccacaaggaggagcctgcagctgagaaagaaccgaatagaggcaaacggccactactggaacatttgcctgacacccgggacgcgccagatatcaccctcgacgagctggaagcgatgctcgaagactgcccggcgaagccaaaacccgggactatcgttggtcaccatatgtctgaccgagtttacataccacacggtgaggggccgagcgccaccacgcctcccattcaacccagcacctgctcaacaggccagacaatcagcgaccacatccaatttggcaccgtcggagaagatgatctgcctgaggacactactacaagccacctgagcacaacccagattgagccaccaaccccagtgcaaagccaccaaaagagatgcccggacagcccatcagagcataaaccaacgcttacaagcggtctacggaaccaggggcaggaaaaggcggccagtagattacccgtacggaccatcgagatccttaagctgcatggcttcacaaattttaatcagcagcactcagatgtggggcctatcgacccagtgatctacaacccaaacgctcacaacctgcaactcgctccccccccactttcaaagctcaaccgcgttttagacgccatggctggccgtttgcaaagacatttctacacctacacgctggacaacaagcgcgccacagcctacatgtctgacgttaaaaacaatctgactggtttagtcttgcccaaattagacaggaacactttgtcagcgtgggtgtcattagcagagtgctccaagagaaccgttagcgtgctagtcatacatggagctggtggcgccggaaagagccgcgcgatccaagagatgctgcgcaaccacggcgatgtggccgacaaaaccaacgttgttgtgcccacggttaacctggtactggattggaaggctaaattgccgggagtggacccaaagagattcatgaccttcgagaaggcgtgcgaacgggaaggaaaagaggttgcaatttttgatgattatgggaaactacccgccggctacatagacgcgtatctaagcatcaaaccaaccgtggaaaccatcatcctaaccggcgaccagcgccagtcggtccaccacgccaccaatcgagaagctcaaactgcaaacctcaagaccaacgtccagcacttcagcaaatactgcgactactacgtgaacgccacccaccggcagcctcagcggttggctaaccccatccaagtgcacgctgaacggaaagtcggaggcgctgtgcacagagccaacctcattccggacaccgcaacggtcctagtaccctcattcaccacccagcagtctctgaacgggctaggccgcaaagctttaacatattcaggttgccaagggctcacgctgccgcacgtcactgttgtgctggacaacgacactccgctgtgttccaatgaggtgctctacacggctttctcccgagcctccgaatctatcaccttcgtcaacactcactcggaccaccccgatttcttagcaaaactggacgccaccccttacctcaaaactttgctgagcggcgtccgtgaagatgagcaggcaggcaaagatgacccgttaccaaaacctgaagttcgtgagcccatgattaaaacccacctgcccgtcgccaatctcgagacatacctggaagacaaggtggaacaagtagaagataaagacaccagagaactctgggacggccgggagaagaccaatctaatgcagactcaagatcccgtggttcaacttttcccccaccaacaggctaaggatgaggctctcttcaaactcaccatcgagcagcgaattcgcactgctagcccagcggaaaacgtgaaggcagtgcaacacactctccaagcgggagacctcctctttgaggcctactctgatttcatgcacgtacccaaggaacaacaagctttcaatccggacttgtgggaacactgcaaacagttggctcttagaacgtatgtcagcaagccgcgcaacaatctggagcagggcaagacgaggcaagacccagactttccagaaaacgccatagccctgttcaataagtcgcaatgggtcaagaagctggagaaagttggattcaaatttaaagcaggccaaaccatctcagccttcaagcaaagcacggtcctgctcaccaccaccatggctctgtacctaagaaagaaacgcctggaacatcagccccaaaatgtgttcatcatgtgtgaaaagacacccgctgatttcaacgacttcgtgctgaatcgttgggattttaagacgccatcctacacttcagactacacccagtatgaccaatcccaagacgcggctttcctcaatttcgagttacgtaaggctagacacctgggcgtacctgacgaagttttggacttctacaaatttatcaagatccatgctaggactttcgttgggaatctcgccatcatgagactcagtggggaagggcccaccttcgacgctaacacggagtgcaacattgcctacgacgccctcaggttcaagctcagtcccaacgtcaacgcatgctatgccggagatgacctagtgcgggaccaagtctgcgatgagagaccagggtggcaactcagcaaacatctgttcacactacaagccacgccactcaccaccaccaccccagatttctgtggatggcggctgacaccacacggcatcgtcaagtccccaatccaactctaccaatctctacaactggccttgagactgaacaagatggaggaagtaaagcgctcatacgccatagattacagctacgcttacaagctaggcgacaaattgcatgaagtgttcaatgaacaagagttagatgcgcatcaactaaccaccagaatattcgtcaagaaaggccttaaaattccggagactggggaccacctaccacaattcaacgttgtgtcagatagactcatcacgaacccacactacaaggagatgcatgactcaacctcggaccgtatcttgctttcagaatttgagattcaagaggactacgtgcccgactacattccaagaatcatccaaaactga

SEQ ID NO: 671 - DNA, 4779 bp, Ambrosia asymptomatic virus 1
  source 1..4779: mol_type = other DNA
atgtctcaggtcagagccaccctagattccttaaatgacatcacagtccgttcgaatattcaacagacttatgcagaagggattaaaagagagttcaaagcggctgctagaatcagccattacaatatgcccatagaagcagccaccaaactagagtccttcggcatcatcacgaacccctactccatagctctacattcccacgcagcggccaaggtgtgtgaaaacaagcttctggacaccgtgggccatattctgccaaaggaaagggtcaccttccttttcatgaagccggccaaaagaaacatgttgcgcagaagtccacaccttgatgattatttcatcaaccagcaccttgaaccgagggatattagcaggtatggatacgaaagtagttatgatgtcattcccgcgatacccacccgagtagcctacatgtcggataccctacatttcttagatgtaaattacgtagctaatatgtttagaaatagtcccgcattagatatactatacgccactatggtgttgcctgtggaagcaaaatttaaacatccgagcatccacccagagatatacagcatcaactactcacacggtggattccagtacatcccgggcaaccacgcaggaggtgcctaccaccacgagttcaagcagttagactggttgtcagtgggtaggataaaatggaaagaactcacagactgggaggaacaacattgtataacagtgcagatgttagaggtgttaggcgccaacatcttgtacgtatttaaaaggggtaacctgctcacaccagcagtgaggactttccaagtagaccaatatgtagtccttcctagagtgttccacccccaggagatgaactcatccaggccgattaaacacactttggccatgcagctgctgctctacattaagacaataggcacccccacgtccaaggatgtctatggaaagataaggcagctcgtcaagacctcagagctcaattacttggatccaacggagctcatacacttgacgaattactactacttcatctccaaactcaacagcatcacctgttacgaagacatcctgtccaagaacatcctgagcggggtgcttctaccagcgaaacagtggctcatcagcacatgggagaaggtcaagggcaagcagcctttcaaccaacttttacaagcactgcagtgggagactttcacctactcactgaaggttgaggatgtagaaaccaccctccaggccccagatggcaattacgcgaaacgggagcgcatgcccctattcaatgacggtgggtttaaaacttttgaggtgctctccgaagatgagtccgatacatcctcgtcttcaggagaatctatagtggttgaggaggctcctgaagggacacccgttgactcaacccccaccagagcaggtgtcctaaaatgcgggtgtggaatggactttgaagtatatgatgaaagtataacccgcctcgatctacttaataggatagagacccccgaccaacttagaggcaggacggccgggttctactcaaagtccatggaaccatacgaatacactggggcaaaacacgaaagcctcgggtggccacagtggctggaggacttcgtcacgaccaactccataaactccgccatggaccactgtctcatccagatttacgatgagggggcggggatccctttccataaggatgatgagaagtgttaccctaaagacaacccaatcctcaccgtgaacctcacaggcactgccgagttcaaaataaggccggctaagcggtggaacagaacctgtacccaccttgaacataaactaggcccagacagcgccttggttatgccggctggagcacaaaagagccaccaacactcagtagtcagatgctcggccggccgcaccagtctcaccttccgcagcacctcaccaatagagaccgtttgggagaacaagctaccagatcaagtggaggtggacgtgcccatttacacctccgaagctggagacccacccactgacataacaaatgcagggccagcacaaaacaagcccgacgaggtagctcaacagccaccggtgcccccgcaaccggaacatcaaatctcgtctgatgacaaaacggacaggtcacggcgaggtgaccaccgagacagcaaccagggggccaaagggaaggaacctattaacgaaccaagcgacgccggcccatcacacaccaaacaggaacacgaacagtccgatgaccaggaccaggttgacgacctgaggtggaaacactggctccccatactcaaccgctgcgggtttaaggggaccgaattgcaacacgacccagaaggcaatttgataagccccatagagcaccaccacaagctagaaaaacgaccctttcccccagaatgcccaaaggcacttgcgaactctctgactgagatgaacaggcagccggtactggtctcattagaccatagacgggccacatgcgtttcagccgacgtgaaatatggaaaattcggaaagctgctggcagatcaggaccgtgcctggaaagagaagtttcactacaacacacagcaaaacaaacgaacaaaggaagtagtggttatacacggcgcggggggcagtgggaaaagcaaagtcatccaagacttccttaaaacggtttcggtggaagagtcttacaaatataccatcatccttcccaccaatgagcttagacaggattggctcacaaaagtccgaaacttagaagagaaaagcttcaagacctttgaaaaggctatgttgcagccttgtggggacatagtcatattcgatgactacggaaaaatgccacctggatacattgaggcgttcgccgcacaacaaatgaacggtgtgctctacatattgacgggagactctaggcaatccgtctaccatgagagcaattgcgacgccgccatcgctcagctttcctcaaacgtggaggaattcgaacagcactgccggtactacctcaacgccacgcacagaaaccgccgggatttagcgaacaagcttggggtgtattcagagagggatggcaccaccacaatcacacatggctctaccatcctcccaggggctcccgtgctcgcgccctccctgatgaagaagagtctgctaggcgacggggggcatcgatctatgacctacgcaggctgccagggcctcacggcaccaaaggtacagattttactggacaataacaccccactgtgctcggataaggtcatgtacacagcgctttcaagggccatagagcacgtgcacttcataaactcaggagcctcaagctccggcttctgggacaaaatgggcacgacaccataccttaaaaccttcctcaggctggaaagagaagagaaactgcgagaggaagaaccccccgaggcccctgagccggcagagcccgttgttagaacacacctgccagtcgacgacgcggctggaatctttgaggatctcatggccaagcagggtgaaaaatatgagcgggagatttacagccaagcccacggccattcaaactgtatccaaacgcaggaccagttcacacaaatcttccagcaccagcaggccaaggatgagactctgtactgggccactatcgagaaacgcatcgccatctcgtccgagtatgaaaacgagaaagaatttcggcttaaggcagacattggcgatgtgttatttgacaactacaagcgtgccatgtgtctgccggacgacccgatccccttcagcgaagaattgtggaacggatgcgctagggaagttcagaacacatacctctccaaagctgtccacctaatcaaaaatggggaggaccggcaaagcccagacatggacctggcccatattaaactcttcctcaagtcacagtgggtcacaaaaatggaaaaagccgctgcacaagtaaagccgggtcagacgatcgcggctttcgcccaatccacagtgatgctgtatggaaccatggcccgttacatgaggagaattagggagagtttccagcccccgaacattatgattaattgcgagaagcggttggaagatcttagcgagtttgttaagactaggtggcggttcgacaaggtggcatcatccaatgactacacagcctttgaccagtcacaagacggctctatgctacagtttgaggtcctcaaggccaaacactgcggagttcccccggagatcatagagggctacattcagataaagacccgggcacacatctttctgggggtcctgaacatcatgcggctaagcggtgaggggcccaccttcgacgcaaacaccgagtgttctatagcctatgtacacacgaagtaccacgtaccagccggctgcaatcagttatatgcaggagatgactcggccatggatgacgtgctggaagagaaacccagctttgccaacatcagggcccaaatgaaactggaggagaagttgcaggttcatgcccaagtaaaggggtactttgccgggttctgcggcaatctgataactccacatggcctggttaaagatccggtcaaacttttagcaggctggaagttgaagaagagcagaggggcgctgggcacggtcgtcgattcctacactcttgacgcacgacacgcataccaacttggggatagggtgcatgacatctttaccgaggatgagatgagctgccaccagaacctgatcagggagattcacaaggtgggtaaaggccaccttctcctatga

SEQ ID NO: 672 - DNA, 521 bp, Ambrosia asymptomatic virus 1
  source 1..521: mol_type = other DNA
taataaagacccgggcacacatctttctgggggtcctgaacatcatgcggctaagcggtgaggggcccaccttcgacgcaaacaccgagtgttctatagcctatgtacacacgaagtaccacgtaccagccggctgcaatcagttatatgcaggagatgactcggccatggatgacgtgctggaagagaaacccagctttgccaacatcagggcccaaatgaaactggaggagaagttgcaggttcatgcccaagtaaaggggtactttgccgggttctgcggcaatctgataactccacatggcctggttaaagatccggtcaaacttttagcaggctggaagttgaagaagagcagaggggcgctgggcacggtcgtcgattcctacactcttgacgcacgacacgcataccaacttggggatagggtgcatgacatctttaccgaggatgagatgagctgccaccagaacctgatcagggagattcacaaggtgggtaaaggccaccttctcctatga

SEQ ID NO: 673 - DNA, 3201 bp, Cassava Colombian symptomless virus; identical to SEQ ID NO: 477
  source 1..3201: mol_type = other DNA

SEQ ID NO: 674 - DNA, 5961 bp, Aconitum latent virus
  source 1..5961: mol_type = other DNA
atggctctcacttacagaacgcctatggaggatattgttatctcatttgaaccccagacacaagcagtaattgctcagagtgctgcagtcatctaccagaaattggaggaaagtaattgccggtacttcaactactacttaacagctattgccaagcggaagttgagttgcgccggtatttatttaagcccatattctgcggctgtgcactctcatccagtgtgcaaaacactggagaattacatcttgtacgatgtgttaccgcattatgtaaatagtagctatttctttgtaggcattaaagataggaaacttaagttacttaagtctagagatcgcaggctcgaaggtgtgcaactcatcaatagagttgttacctgtgctgacaaattgcgctacagcaatgaactagttcagtacaactccctcccacatgagggcctggaagggcaccgaatcgcccttgaaggcgatacattaaagagactggtgggaccactcctccgacataaagcaaagcacctcttcctccacgatgagttacactattggagcagtgatgaattgtgcacatttttggaagtcatgcaacctgaaacaatgctagccactttagtgtacccacctgaactcttattcaagcaaaccaagagcctcaatgagtggtgttacaccttcgagataattagaaatactttttttttttaccctgatggcatccggagcgagggttaccaacagcccctgaatggtgggtacctgcttagtaccaacagcatcaaacttcaagacggcaccgtctatggagtcgatatcttgagcagcaaatttgcacaccacttagtcgctctcactcgaggtaaggcggttacgagtacacaccgatcttttgggccttttgaagcttctacagcttctggtttatcgagaatttgcccaagctaccccatctgtctgccaatcccgtgcgaggtcattagcaagatttacaggtacctgcgtaccttaaagaagccagacgtgcagtctgcaaatgctaaattaagtcaaatcgtcgccgaacccacaggacgtgaaatcacattcgttgaagaatttgccaaatttgtcatcaagacagattcaatctgcacaactttctctttcgacgaaatggagaagttcttccgagctgtgctcggtaagttgcctgcggtatttgcacggcaattcgctagcgtacgcgagctgggattgcacgaattcatcgaggggctagagcccttcaacttcacaacaaagctcaatgtgctcaaccagggtgatatctggcagaatctctacaagtggttggaagatgggagtgattgcgaggatctacccggcctgtgcgatggcacattcatgttcggcgtcaaatctgggcttcgagatagacgtgcgcaaccgtaccacggcacaatcgcgctctcagtgcaatcatgcggggccttgcttgtcatcccaaaggataaattgcgtaatcacctgattggcctttacatgagggaacgttgtgatgggttaacccgaaaggtttcacattctgctgtgctggcttactgtaccgaacgtctagcgcacagcatccttttaccaaaagtaagacgacgtggttgttctactacacgattgagtaccctcgagattctcggggtatgcgagttgacgcctctaatcagacgcataatccgctacgtcaattgcaaatccagaacgacctttggtgaatcaggcatcgagtggttcttacttcacaaaacatttagggcccggacactcttcttaaattctgtacctgatgctaagagagtggtgaaccccatcgccgctctgtggggcatggttgtttctgaagtggtctcttctggatgcagatggtctcacaaaactgaggaattctgtgaacctgcgcccactagagctagctttatcatgccacccctgaaggttaattcggtagcttgcgcaaaagaccagctcgcgagtacatctagtcaaatggtcgcatacagtaaagttgatgatgatgaactgcatatacctttcatatgcaaatgtggcatgtcaatgcccatcactgatctggtccttccagaacacccctttgattcacctgacactttacgcaatcggcgggcaggctggtattctagggggaacatcagttattcgtacaacggtggttctcatcaaagtctgggttggtcaaattacatcacgacttggtgtgaggtgaatggtgttgaaggtaagtacgactgctgcctttatcaagtctatgaagcagaagcagcgattggctttcatgctgatgatgaaacgatttttgagcccggcgagagcgtcctaacaatcaatttggaaggccgcgcatctttcggcatttcttgcgcaaaaggagatagcttccgagttcttaatggaccactgcagttcaccatgcctatgggatttcaggctgatcacaaacattgtgtgcgtggttgtaccgctggacgagctagcttgactttccgttgtctgaaacgcacacagctgcctcaagctattgaggtgagtgctaccaaacaatcacaaagtggtgatgattctgaagaatcggacgatcaaaaaggcgccgactacagttgccctggtgttaagtattctgaaaagggcctcccgaaggattccaattacacgacaggggaaagttgcccaggtcccaatagcttctggcgtagtctctctgcgctaacacgatacaacttgagcgaagtgaagagactgagcttaatgcacatttttggcgatgctagatgcgatcaagccattaagctctatcaatctacggggacgatcttgggcgattcgtgcatagctgctgccgctatacgtctcggtgctactataaccatatggaacatggaattggaattgcagcaaatctatgcccctgaaagcccacgcatggctctacaccttgaatatacggccggcatgtacaaacctatcttcttgaagaatggatgtgtcatcgttgcggtggctgaggcgatcgggcggaccaacgctgaagtgcaacaagtgctaaacgactgctgctgcgacgggctcctgaaggagatatggcgtggcgagggattgcaacgcaatgatatggagttggtattcaaagcttttgacattgaagcatatgttactgaaaatgatgataccagagtgtacaatgcttcgggtacgcttcggaaaaacttcaaattggtgaattcccacttgagttacgaaagccgggccaaggatccttgcagcacgcttttagctggcttggtggactcgaaatgtttccccgtggaagttctagattccctacgctctaaaggttttaccaggaagtatgtgattgatagcgttagagctgggatgcttgctgatacctttcataaagctcaaaccggcgtattgcagtctgaattatttaataagaagactaacctgcgcgagcactttagagaatcacatgaggtagacgtgacagttattgtagggatctttggctccggcaagagtcatatcttcaaaatgatgttggatcaagcgcggggcaaggtttttgacttcgtctcccctcggagggctttagctgatgcattcaccaaattagcaggggttaaaagggggaggcgcgatcgcataaagctcgggcaagagaattggcgtatcaacacatttgagaaattcctggatcgcacgcaattcttacacgaagggcaggtcgtaatcctcgatgaatttcaactgtatcccccggggtaccttgatctcattatgtctctgatcaaagtggatgtgcacctctttctggtgggtgatcctgcgcaaagtgattatgattgtgagaaagatcgcctggcactgcaatctctcccagatgtcgcaagtactgtgttactgaatgtcacctacccttataacggattgagtctccgttttcagaaccgcaattttttgggcaggttgccatgcaatttggatgagagcacggtgaccatggatgagccacacgagttacgagcaggcctcgacgtgcttgaacggttggaggaacactacagcgcactcgtgctcgtcagttcattcgatgaaaaaacaattgtcttgagctacctaccaaaggcgcaagtgctgaccttcggggagagtactggtttaacttttgattacggcacgatcctgatttctggcatatctgaacgagccaatgaacgtcgatggtacactgcattgagtcgattccggaagaacatctgtctagtgaactgtacaagttcgagctacgaaaatctagttgtctcctacaggaaaagggcacttggcaaatttctcagccagacagccaatctagacgatctaagagttgtgctccctggtaatcctgagttcagaaatggtttcacagaaaggacaggtaaggacgagggggtacgcgaggataaaatggtaggtgacccatggcttaagacgatgataaatctgtaccaaggagcggagatgcaggacgaggagatagctgaagcaataatacaggaatcatggttcaaaacccacataccccgtgaggagttggaatgcgttcgcgcgcgctgggtgcataaaatccttgctaaagaggatcgtgaggtgcgcatggggcatatgatctccgaacaatttacggatgattacagtaaacaggctggaggcattaggctcacaaacgctgctgaacgctttgagacgatctatcctagacatcgcgccaacgacagcgtcactttcatcatggcagttaagaagcgtttgagtttctctaaccccgccagggagcgagctaagctctttaacgctcaagcttttgggagaccacttctgaaggaattcctcaagcgtgtgccgttgcgtcccgcgcataatcacgaatttatggcgagagctttgtgggatttcgaagagaagaaactgggtaaaagcgccgccacaatcgagaatcatagtggacgttcgtgccgcgattggcctgctgatgtggcccaaattttctctaagagtcaactatgtactaaattcgacaacaggtttagagtagccaaggctgctcagagcatcgtgtgtttccaacacgcagttctttgcagattcgccccatatatgaggtacattgagatgaaggtgcacgaggccttaccaaagaattactacatacactctggtaaggggctgggcgaattaaacgactgggtcaagcgcggaaaattccaaggagtgtgcactgaatccgattatgaggctttcgatgcgtcgcaagatgagtacatcatggcttttgaattggagctgatgaggtatttgcgtattcctggagatctcattgaggattataaatacattaagaccagtcttggttctaaactgggaaattttgcaataatgaggttctctggtgaagcaagtacattcctgttcaatacgctcgcgaatatgctgttcactttcatgcgttatgaaatcaagggaaatgagttcatttgctttgccggcgatgacatgtgcgcgcccacacatctgcagacaacagggaggcacaaatcatttttagataagcttaaattgaaagcgaaggtgcagtttacgggcaaaccaacgttctgcggttggcatctgtgccctgatggaatctacaaaaaaccacagcttgtacttgaacgcatgtgcattgcaagagaattgaacaatctagctaactgtattgacaactacgctatcgaggttgcatttgcgtatcagttgggggaaaaggcgctcaatcgcatggatgaagaagaagtgggggctttttacaattgtgtgaggattattgtgaggaataggcacctcctcaaatcggacgttcgtttcatctttgaacgtgggctcggggattaa

SEQ ID NO: 675 - DNA, 5934 bp, American hop latent virus
  source 1..5934: mol_type = other DNA
atggctctcacatacagaggacccattgaggaaattgttggctgcttcgaaccagctgtccaatcagcaatcgcttctacggccgctaatgggtacaaaacgctagaggaagagaatttccatgcttttaatctagctttaagcgcaatcgctaaagagaaattatcaaaagctggaatttacctcagcccctactcgggcgtgccgcactcgcacccggtgtgtaagaccctcgagaattacatgctgttttcagttttacctagtattatagataatagatttacgttcgtaggaattaaaaattttaaattagactttctcaaagctagagttgagaaaaaaggcaagcgcaatgtgaacctcattgaaagtatcaatcgatacgtaacgagcgctgataagatcaggtatggaaacgatttcgttatcgcaagttcaaaaccctgcaaaatgcttaaaagacatgcaccattattgggtaaggcggcactgcgagaactgatccctgaatgtgtacagcggagggcgaagcatctctttatgcatgacgagatacactattgggatgctcgcgatctctgcgggttcttggaggtcgtcagaccagagacacttttggcaacactcgtttatcctcctgaactgctgagcggggctaaggaaagtctaaatcgttggtgctacaccttcgagattaaagattcgaacctccttttttatcccgatggagtccgctcagagggttatgtgcagccgttacgcaatggcttcctattgaaagccaacaggatcgttctggccgatggcactgtttacggggtgggcctcatatgtagcaaatttgcgcatcacctcgtggccataactaaaggtagcgagctcaacgtcgattatcggagtttcggccctttcgaagcagtggcttgcaatggtctttcaaaaatggcccgcaaggtcaatggctgtttcccggtatctttcgatctcgtatcgagggtgtatcggtatttgagaacactgaaaaaacccgatgtgcagtccgccatggcgaagttggggcagcttgttcccgagcccaatggagcagaaatcaaattcgtagaggagttctccaaactggttatcagaacaaacaccatcaattccacgatctgcgcggaccatgccaagttgttcttggggaatatgctgggttgcctccctggaatcttcttgcaaacttttggggttgctagagaggtcaatcttgactcatttgtagcagcgcttgaaccatacaccttcaccctcaagatgaccacgatcgatgacaattacaaggaggttattgactttcttaacttcggggagtgtgaggagggctatgatctggtcagcgcgatggatagcaagctctacggacctaggatcggtgtgcttaaccgcacccagcagccatatgtgggcctcgcgccagtgcgtgacgagaagaaagttctgcttcaattcacgaaggagcaggccttgagggccctggttttcatcctacacaagtcgttcaacgattcgtatcaaatcgggatttcaaaacccttgttaaaacgctggctgagggaggttcgcagcaaacagcgcaacttgtggtgtaagcatattgacgaactcctagtggatgaggccgaattaaccagagtatgcaagagggtgctcgccaagggaatcccaaagaaccggccgtacatgcctaaaagattggaggcggtacctacacgatgtgccgtcccacgtgaagccaagttggcctactcctgcgtcgtttccgacattttgagacgtggtgcaaagtggggagccgaggaactagccaagaaattgaaaattgaaaccccacttgtgactgagagcgcgcacaatatccccccacctgagccagttgaagcggaagtagtccacgagcctctagtttgcggttgcaatgaagacctctcctatcgcacattaccgcatgctgggttgatacatgagtatttcccagataaattgaggaatagagaggccgcttggtatgcaaagaacgggacgtgttaccgctatagtgacattacgcaccaatgtctcgggtggccaaactggattgagaagtgggctgaagttaacgacttggatatatcgggatatgactgtttgcttgcccaacgttatagggaaggaggtgcgataggtttccatgctgacgatgagtgcatctttgagaccggcggtagcatactaactgtgaatatcaagggaagagccctatttagtctagctggtaatgtatgcaggaaggtgtgggaactgaacgacggtgagtgcttcaccatgccctgcgggttccaacagacacacaaacacgcggtcagtgggtgctccgaaggtcgcatcagcttcactttcaggaaactcaagacgacctgcgttactgacaaacctgcccccgaaaccccacaggacaatgcatctgatgatggagccaatggatctcaatcaatagaaaagcctgtgctcgatgcagacacccaaatgagcgattccagtgattctggcggcgagcttgatagcgtcgcaagcaatagagaaccatctcttacttatgaggtaggctgcgtcgaattcacgtggcaacccgctgaattgtcctgcaataacttcaaatttgtgaaagttaacggtgatggtaactgcttctggtacactctggagcatttcactggtgtaaaccaaagaaggatcaaagaggctgcaaggactggcgcctcctacgacagcgagtttagcgtcaggttggctgagcagctgcaggaccgtgtgatggccgaggaagaggctattagtgcagcgagttacgcgctaagagcgcgtcttgtgatctatgacttcgagaagcaatgcatagtctcggtgggtaatgaggttttcaagcagacttatttcattggtctgagtaatgagcacttttcacccgttctaccggtgaatgattgcctagctgtggccatcgcagctcaccttgatcgcaaggttgaagacgttataaacgtactgagcaaacaaatggatgaagcgagcttcatggatctgtggtgtggcaagggagttgatgtgtcatttttgccacttatctttgagatgttcaatattgaggcactggtcactgggaagggcgaggatatccttatcaatgctggcgctgaatttaagggggtctacgatatcgtggaggagcacataacctatttacctgaacgcaaagtaccgcatcaccaggtcttgaataccaatgtgggcaccaaaggtgtaaacaaggggtctctgcagctcttgcgcggtagtggcaccatgttggactacgctccagaaatgagccgagcgctcagacttgccaaaaatcttttccaaggtcgtacaggtgcaataagttctgggcttttcaacgacaaagcaagtctcgagcctgatgttcacaacggggatttctcgtcaagggctgtttgtgttgtgttaggcactttcggcgcaggcaagagcaccttgttcaaaaaatttatgcaagcgaataaaggcaagtgcgtgcattatgtgagtccacgtaggggtttagctgatgattttgcttctgcaatgggcattgaacgaggaccgaggaagaaattgaacgtggcgtctcaaaactggagggtgaacacttttgagaaattcattgcagttatcaagagcataggctcaggcgcagctgtcatcatcgacgagatacagctttaccccccaggttaccttgatatttgcttagcactacttgaacgtgatgtacacatattcctcgtgggcgatccatgccaaagtgattatgacagcgaaaaagacagggcctcgtacgcttttgaattgagcgatattgagatggtgcttaaagagcgtgaatataggtacaacataatgagccgccgcttccagaatgcaaatttggtgggtcggttgccatgttacatcgatcaagagcggatcaaaattgatgagagctatctgatttatgatagggtggaggatttggcagatctgcccgatgagtaccgtgacgtgatacttgtctcttcattcgatgaaaagaagatagtggaaagttacacaccagatgcgaagcagatcttaacctttggcgaatcaacaggcaggaatttccgctgcggttgcatcctggtgacagaggcttcgaaatacacaagtgagaagaggtggatcacggcgctttcgcgtttctctcgcaatgtagcttttgtcaatgcaaccagcacttcatttgagcagctcttgttggtctacaaaggcaaggtactcgctgatttcctttgcaaaagaagtacagaggagttctttacgcagatcctacccggcaaacccgtttttcgaaaaggtttcagtaacgccgtcggcaaagatgagggcattatggaagagaaattgcaaggtgatccctggttgaaaacgatgatagacttgctgcagattgaggatattgaagaaaccctgattgatcaagaggagatgcagaaagaatggttcaaaactcacctgccacagtgtgaattagaatcggtacgcgcgaggtgggtgcacaaaatactcgccaaagagcatcgcgagaagaggataggctgcatgatatccgagcaatttacagaggagcacagcaaagaacagggcgttagattgacgaatgcttgtgagcgttttgaaactatttacccacggcacagggccaatgacaccgtgaccttcctaatggctgtgaagaagaggttgaggttttctgatccaaacaaagagcgcgctaaaatgcacgaagctggtaattacggcagattcctgttgaaagagttcttgaagaaagtgcccctacgtcagaaacacaacaaggagctcatggcgcaagccaaagcagattttgaagcaaagaaaacagctaaaagtgcagccaccatagaaaatcatgctggacgctcttgtagggactggcttgccgatatcggactcgtttttagcaaatcccaaatctgcaccaaatatgataatagattccgctcggccaaagctgcacaaaccattgtctgcttttcccatgcggtgttgtgcagattcgccccctacatgaggtacatcgagtacaagctcaaggaagttctacctgagaagtactacatccactcggggaaaggactggaggaactgaatgattgggtgattaaggggaggtttgatgatgtgtgcactgagtcggattatgaagcttttgatgcaagtcaggatcaatacatcgttgcttttgagattgaggttatgcgctatctaggcttgccagcagatttgatcgctgattatctctacatcaagacccatctcggttctaagcttggaaatttcgcgattatgaggttctccggtgaggccagcaccttcctgttcaacactatggcgaatatgcttttcacattcttgaggtatgaaatcaaaggccgcgagaggatatgttttgcaggtgatgatatgtgcgcaaacaccaaattagttatttcgagagagcacgaatggttcttggggaagctcaaattgaaagccaaagtggaaaacacaaaaaggcccaccttctgcgggtggaacttgtgcagtgatggcatctacaagaagccacaattagtgcttgagaggatgtgcatagctaaagagacaaacaatctccacaattgtattgataattacgcaattgaagtatcttatgcttatttgatgggagagagagctgtgtgcaggatgaacgaggaagaattggaagcatactacaattgcgtgcgaatcatcattaagaacaagcatttattaaaatctgacgtgcgtgaggttttccaggaggtttgctga

SEQ ID NO: 676 - DNA, 1120 bp, Caper latent virus; identical to SEQ ID NO: 550
  source 1..1120: mol_type = other DNA

SEQ ID NO: 677 - DNA, 734 bp, Fuchsia latent virus; identical to SEQ ID NO: 551
  source 1..734: mol_type = other DNA

SEQ ID NO: 678 - DNA, 5973 bp, Gaillardia latent virus
  source 1..5973: mol_type = other DNA
atggctcttacatacagaagtccattagaagaaaatgttgccgcatacgactccaacgttcaatccctaattgccagcacttcagctcattactacaaggaggaagaagaaagcaacttcaaattttttaactaccacctcaccccggtagcaaagcaaaagttgatcacctccggtatctacttgagccctttctcagcaatgccgcactcacatccagtgtgcaagaccttggagaactatttcttgtatatagttgctgcacctttgttagatagtagattctactttgtaggcattaaaaatcataaaattaacttgctcaaaactaggaatagcgatttaagtatggtgagcaagataaatagatatgttaccagtgccgataaggtgcgctatggctctgattttgttacaaaaccgatttacacaggagaatgtttggcccgccacaggtcatgccttgaaggcgcaacactcaaggatttagtgccagcattaaaagaggggaaggctaaacatgttttcctgcatgacgaactgcattattggagccctcgagacctgatcactttcctagaacttgtaaagccagagatcatgtacgctacactggtttaccccgctgagatactagcgggtgcagcattcagcttgcacccttggtgctacacatttcaaatcataggcgggaaactgattttttacccagatggcgtccaaaccgaatcatacgaacagccgctctcgtgcgggtacttactcgaggcaaaacgaatcataacccgacactccatctacatggttgaccttgtacagagtaagtttgcccaccacctcatagctattacccggacagaggcgttgagcccgaactaccggtcgttcggaccgttcgacgccacaagcagctctgcgttgagcccgctgatgcggacagagaataatttcatacctgtcagttttgagattgtatccagggtgtaccgttacctacgaacgctaaaaaaacctgacgtacagtccgccatggccaaattaagccagctgttgcaggagccgcggggagtggaaatcaaatttattgaggacttttcaagcctggttataaataccgggactgtgaggtcaataattaaaccggagctggttaaactcttcctgggtagatggcttgggcgattaccacacgccttagcagtcaagttcagtggtgttagcgaggtaagtttagatgatttcgtcagtcaaatggaaccgtatacatttcaaattaagttggctgatgtggattggaattaccaccatcgctgggacctttactcaaaagcagaagaggactatggggtcgacgctagtaaattactggaagagagttttgtggccaatcggctttacgagtttggggatagagcaagggcaccttactacagtgtcaagggtcagaagaattggcaccacatcctcgaattaaggtctgattttgacgagatgtacttcataagtacttgcctcagagaattattcaatccgaccctgagtgggatatcattctatgaggtgcttggcgtccttactggcaaattgcaggctagcaagagcatactcattagcaccaagtcatccatcagacaaatgcaagagcctggccggtataacgtctacatgagagcagtgagccggtacgcgccaaagcacgaaagagagtgggcgagctcaggggcaaaatggttttttgtcagcgataggcacaatcagcagtacttgtgcgatcagcccgatggaattgccgtccccaaagccttcaagaaggtattcgggaccgtggtcggagatatcttggctggagtgaagttgcgtaagcgaagagttgttggtttcagactagctgaacagcccactcctgagaccacgagtggagaaggtgagggtggcatgaggcatgacccaaagccacagaatgacgcggagcccatcagagaagaagaggccgtgccagttgtcgtgcagccagagcagttgtgcccagcttactgtgcctgtggtattgagctagagcgttctgaattgatagcaaccgacctacacgcattccgagcaccagacaatttgggcaatagatctggcggctggtactccgccactggggtggggtacaaatacaacggtgggaagcacggatcgcttggttggcccaagtggctgggggtgtggatgcaactaaatggaattgatagtgactattacaactgctgcctatatcaagtttataaggaaggggcgaggattgggttccatagtgatgatgaggcaatttttgaagaaggggcctccatcttaacctgtaacattactgggagcgcggatttcagcttcaagtgcacagtgggcggcaactctcaatttctagatggacccatgagtatactgatgccggaggggtttcaggagagtcataagcactcagtaagcaggtgctccaaaggacgcgcatctgtcacattcaggcgcttggcaggggagatgattggggaacaaccaatagaagaacttcgaaaagtgtgcgtggcagaacaaagggagcaggggcccgaatcttcagagctgccagagcggagtgggagtgagcaacctggtgaattcacacagaggaactgcatcggtgtggtgaaccacaggcatggcataccaaacatgaattataacctcatcgatgtgcctggtgatggaaattgcttttggcattgtctaagtaaggccgtgagtatgggcgttaaggagctcaagcaggcttgtacccgtattgattttaaagatgaagagctcaacacgcgatttgaacaccagatgcagccaagggtattcgcagaggaagaagcaattatggcagcagcggccatactgagagctaaaatcattgtcatagctccggaaggcccccaagtctctgaattcaccccacatggtgagctcttgcaagtgcactatttggagatgaaagcgaatcacttccagctgattgaattaaagaactcgtgcgttatccgcgctattgcgagcgccatgaatcgagagtgccatgaggtactaaaggtgttagaagaatccggagatctggaggaaggatcacttttactttctgggcttggagttgaattggccgagctcgaacacttcttctcgctcttcgggattgccgctttggttgaggcaggcggtacagaacacaggctgaacgaaacgggtccagtgccagcatactttaagcttgagaacgcacacatcgaacatatcaggaagaattgcagcgtaaaaagtgaactgctcagaggtgagaacctaggtctgaatattacaaatcgatcacttctctacgccgagcaatgtgggtcatacctgaagtataaaccaaatgaatcaagggccaaggttcttgctgattgcttccttgcgggtagaactggcatcctcaattcaaagttgttcaataacagcgggaacctgttcgacgaaataaatcacaatggtgagcatgaggagtcggttttgggagtgtttgggacctttggatgtggtaagagtaccgcgttcaggcaattcttccatctcaatccggggaaaggggtcttttacgtctcaccaagaaaagcgctggctgaagagttcaggtccaagaccctaagcaggcaagtggggaggctggataaaatcaaggagaaaaattggctgctctgcacgtttgaagtgttccttaagaaacaccacctggtgaagccagggatggctgtaataattgatgagctgcaactatatcccccgggttacttggatctcaccatgctactatgccctaagggtgtgcttttcctggttgggggtgatccttgccagagcgattatgacaatgagatggacagaccctggcttggtagcatggagagtgactgcgagagattgctgaaggggcagaaatataagtacaatgggctgagtaggcgctttgtaaacaagaatttctcaagtagattacactgccaatttacagaggaccgcctaacagaggaggaaccccatctgctgtacacggggctcgatgaaatggtgcaaattgaggatgagtacaaagaggtattcttggtatcgtcatttgaagagaagaagatcgtaagtgcacatttcgatgttaaaagtgaggcaatattaaccttcggtgaatcaactggtttaaatttcaaacgtggggtgatcatcatcaccaacgtttcagcgctcacttcagaaaagaggtgggtcacggcactcagcagattcagcacaaatgtgtgcctggtgaacctagtcggggttgattggtcgacgttggcgaaggtgtacgtggagcgaactttggctaatttcttatgcgctcagtcacatcaaggtaagttgcttgaattgctaccgggtgaaccacatatcaccgcagggtttcctgataaaatagggaaggatgagggactgcgtgaagagaagatgcaaggggacccgtggctagaagggatgatcgatctgttccagattgaggacgtagaggaagttgaggaacagttcgaggaactgcaggangaatggttcaagacgcatcttccaagggaggagttagaatcggtccgcgctagatgggtgcataagctcctagcaaaagagttccgggaagtgcgcatgggttatctaacttctgagcaattcacagatgagtaccccaaggatgcaggcgtcaacctcacaaaccaagctgagagatttgagacaatatacccgagacatagagcaaatgacagcgtcacctttttgatggctgtcaagaaaaggctaaggttctcccggccagcaaaggaaaaatgcaagttgattgaagccagttcttatggtaggttcatgctcaatgaatttctcgacaaggtgccacttaaaaggaagcatgatccaataatgatggcacaggctaagaaagagtttgaggataaaaaaacgagcaagagcgcagccacgattgagaatcactcgggacgatcgtgtagggattggctgatagacattggccttgtgttctcgaaaagccaattatgtaccaaattcgacagccgattcagagttgcaaaagccgcccaaagcatagtttgcttccaacatgaggtactttgccggttcgcaccatacatgaggtacatcgagaagaaactgcatgaagtgctccccgaacgatattatatccactcaggtaagggcctcgatgaactcaatgattgggtcaagaagggccgattcagcggcatctgtaccgagtcagactatgaagcttttgacgcgtcacaggaccaatacatggtggctttcgaggtagaagtgatgaggtacttaggcctgcccaatgatttaatcgaggattacaaattcatcaagactcacctggggtcgaaattgggcaacttcgctatcatgcggttttctggagaagcgagcactttcctatttaatactatggctaacatgcttttcaccttcttgaagtatgaaataaagggtcatgagttcatatgcttcgccggtgatgatatgtgtgcctcagagcgtttggcgttgaaaaagcagcatgagtcatttctaggtaaactcaaattaaaagccaaggtctttatggttgacaaacccacgttttgcggatggaatctatgcccagatgggatctacaaaaaaccgcagctggtcatggagagaatgtgcattgccaaagaaaaggccaacctcgccaattgcatagataattatgccattgaggtatcttttgcttacaaactcggggagagagcactgaaccggatggatgaggaggaagcagctgccttttataactgcgtgaggataatcatcaaaaacaagcacctgcttaaatctgacatccgcacattgtacgaggaaaataagttgacttag

SEQ ID NO: 679 - DNA, 5856 bp, Garlic common latent virus
  source 1..5856: mol_type = other DNA
atggcactaacataccgcagcccattggaagaggtactcacctcattcagcgcatccgagcaaagtttaatcgcagagccagccattactagttatcgaggattggaaagagatctgttccatttctttaactacaatgtagggccatacgccaaagagaaactaatcggcgctggtgtgtaccttagtccattctccggtgttccacattcacaccccgtatgtaaaacccttgaaaaccacttattgtacagagtattacctagtattttagataattcttttctttttgttgggataaaagaaagtaaattgaacttcttgcgcgctcggcatcaaaatttgagtatggttgaattagtcaatcgttatgtaacaagcgcagacagaacaaggtaccccaacgatttccacctgagtataactgcagagcaatgtttcaatagatatgatggttttaagcacctgggtcccggattgcggaaactcttaccgcattgtattacagttaaacccaggagactgttcttacatgacgagctgcactactggtgtgagagggacctggttaccttcctgtcagctgtcaaaccagaaaaagttctaggcactgtagtttaccctcctgagctgctcaaaggggtaaaatttagcctcaataaatggtgttatgatttcgacgtcgagggcgacgatttgatcttttaccctgatggtgtgcgcactgagagctatacacagccattgagtggttgtttctatttgaaagtaggcacgctcaagcttctagatgggagcgtttaccacattgatgttgtgcatagtactttctgccaccacttgatttcaatcactgctggtgaggctgttcgggccccaaccaattctttctccaactttgatgcgaccacctgtcgtggtttgccgaatatcgcgttcagatccttgggaccatgcattgcggtgccatatcctgttattagtagagtgtaccggtatttgaggaccttgcaaaagcctgatttacagtctgctatggcgaaactctcgcagattatgcctgaacccactggatatcagattaaatttatgacagagttcagcaaaatggttattgacacccctgttggagctagtttcttccaggtagcaatttttgaaaagtttaagggtttcctaacaactttttttccgaagtatgttgctgcacgttttgatgttgctaggatccggtctttagatgaatttgtagagcatatgtgcccttacacgttcaaaattaaagctgtcgtccatgacatgaggttgcaccaattgctcttcccacgggatgaagaaatgcccagagacgaagattttgatacaatccgggcactagagatgcagtggggtggtggggcaaatggtgagaggataggtgctgcatacaccgttggccctttttgcgattaccccgttattgatgcgcagaaagttttccaactgctgcgagttatttcacgagagtggtcattttcattctcaatggtccaatattgcgaacggggtgattatacagaatttatgcaagcatctaaattgatctggttctcttcaaaacttgctggctgggacgtgtgtcttgcgacttataacaaatatgtgcatatgaggcacagtgattggaaacgcaggctgaagagctttaggtctattggttgtgcttggttttgtatgcgagttagatcttatgagcgttacatctgtgcgtaccccgaccaagcaaaaagttataaagctttggatgaagcatatagcacagttgtagctgacttgctcggaagccttgctcggaataagctaattatttccgctgctgctccaaagtttgataagactagcaaagttcccagggagggtgttgcagaggaaattcctgcgcactgtgcgcgaacgagcgctgcttttgcttccgcaccatgcggctccacagcatcatcggaatgttgcgtttttgagctaaatccacctgctcagattgctgatcttagctgttcatgcgatcgtactcttgctgtgcttaacgttttagcctacgaggctcttgagctagagtttcctgatcagttacctgggtgccgagccgggtggtatgtcaaggggccgcaggttgcagatgttggtgggtttctgggttgccagcaactcagatggcttgatttttttgacagtttcttagagctgcacggggcacaacccggatcttataacagttgttttgctcaagtttttgatcttgacagcacttttgagtaccatagcggagatgggggtgtctttgaggagggagccccagcgtacctttttcaaacgcgtggtacttccagggttcacgttcaaggtttgggttgttgtggggagcgggctctgcttgggccaatgtgcttcgagatgcccgctagtttattgcttgaacacaggtggaagatatcaaagagttccacaggttgtaccataatgacttttaggaaactccgccaaggggagcctccggtagttgagactactgcacctacagtgcagaaaggggtaggcgtggattcatcctttacttgggagcagtacggtgtcaccatcttgagcagtcatatgagtaaagcacctgatgggcgtattgaaccgcaacgcggcgatgggagttgttttttccattgtatggagcctttcaccaatttagaagcctcgctcttacgtcggacaatagcaaaagagatggcgagggattctaaggttttggagagtgatctcgtagagtgtcaaggtaatggacccgtttcagacggagttatagcatacacaattagatttttgggtcttaaagtgaggtttttctctccagaattgaatgaggtgcgcaaatttagcacatgcactgccacaaacttctgggtcgatgttttgcatcacgggaatcacttcgatcttttgtaccctactaatgactgtgtactgattgctttggaacaagggctcggccggaaacgcggggacattctcaaggttttaagcaggccgcagcactctgatatctttcagatagctactgggggcgtcgggttaactttggagttacttgagcctattttccaatgtttccagattgacgctcgcgttttatgcgggtcagaggttttcacttatcctacatctgggacttttgctttggattttgaactagctgacggtcatctttcgtttaagagtgcacgcaggaaagaaacagttagctcctgcttgaaggtagtggaagcgagtccacatggtaggttggttctcaattgtgcaggtacaggtgtgttgtttgaaatatgctccaacactgcgcacaagcttgcagagtcactttttgatggtcgtaccgggattgtgagctcaaaactttttaacaatagggaaaggtttgaggtcagctcaacttcattgctaccacgtactctaaatgttatttgtggggtctttggttgtgggaaaagtacactgttgtgcaaggctttagaaaagggccttggcgtatgcatttttgttacaccgagacgtagcttagccgagcaaatgactcagcttgttcagagtgtagagacttccacttccgtgaccattttgacatttgaaaaatttttgcatcaaatggttaatgttaaagaaggtagcactatcatttttgatgaatttcagttgtaccctcctggctattttgatcttgtgtgtagccagctcactgatggtatctccctgcatttgctaggtgacccatgtcagagtgactatgataacgccaaggaccgaggtgtttttgaggggctgctgcctgaccatcagaggatcttacaaggtatacaattcaggtatgcgactaggagttatagattctcgaacccaaatttcgttgggcgtttgccgtgcgcaatttcgaacacaaatgaggatgactttgaagactttgaaatacttgaagggattgagcaggtgcaggaaatagatgttgaatgttacttagtctcaagcttcattgaaaaacaggctgtacgagcgctcgtgggacttgataaagtagttcaaacctttggcgagagtactggcttaacatatgattgcgttgctgttgtcgtttctgaagcttcaaaattggctagtgaacggcgctggatcacagccttgacccgtgcacgcaagcgagtaaccttcatcacaaatttgggttgttcaaagcatcttatcgctgagattttcagtaatcgcgcacttgggcgtttcctctcttgtaccgcatccattgataatcttcgttgcttactacccggggaaccaaattttgtcgaggaactagtgccaacgattggtgcaaatttaggtgtggtggaggagaaggtcagtggtgacccctggttaaaaacgatgctattccttgggcaagtcgctgacgtggctgatgaaatagacgtggatgaagctctgcaaattgaaccctttaaaactcacgtcgctagaagcaaccttgagggtgttcgagcgttatggcatgacaagattaggctaaaggagcatcgcgagaaacgtatgggctaccttgttagtgagcagttcaccgacatgcatagcaagaatatggggaagaagctaaccaatgctgctgaacgatttgaaacgatatatccaaaacacaaagggagtgatacggtcactttcattatgggcgccaggaaaagattgcggttctccaagccagcagttgaggctcggaagttgatggatgctagcaattttagtgagttcatgcttcaagaattcctgaaacatgttccacttaaaaaaccacataaccaggcattcatggatgcttctcttgcggactttgaggaaaagaagacctcaaaaagtgcagctactatcgccaaccatgcaggccgctcatgcagggactggttaattgacacagggctagtatttatgaagagccagcactgcacgaaatttgataatcgctttagggatgcaaaagcggcacaggctatagtatgtttccagcacgccgtactctgcagactagctcctttcgttcgttacattgaacggaagatagctgaagtgcttccagagaaattttacatacatagcggtaagggtttggaagaattgaatgcatgggtcactcgtggaaggtttgaaggagtttgtactgaatcagattatgaagcttttgatgctagccaggatcagtatatacttgcttttgagctacatgtcatgaaataccttggattgcctagggacctcatagaagattacaagttcattaaaatgcacctagggtcaaaacttggcaatttcgctataatgagattctctggggaggcaagtacctttttgttcaatacaatggcaaatatgctttttaccttcttgagatatgagatcaaaggccatgagcgtatctgttttgcaggtgatgacatgtgcgccaatgcccgactccgccaccgacttgaccaggagaagtttctagggttgctcaagctaaaggcaaaggtatcatttacgcaaaaaccaactttttgcggatggaacttatgttcagatggtatttacaagaaaccacagcttgtgcttgagaggttgtgcatagcgaaagagaccaataaccttgcttgctgcatagataattatgcacttgaggtagcttttgcttacaagatgggtgagcgggctgttctgcgtatggatgaagaagagttacagagtcattacaattgcgtgaggatcattctgcaaaacaagaatctaataaagtccaatgttctcacctacttctccgcttag

SEQ ID NO: 680 - DNA, 5916 bp, Hippeastrum latent virus
  source 1..5916: mol_type = other DNA
atggcactcacttacagaacgccaatggaagatattgtatctgctttcgatccggcaacccaggcagcaatagctaatacggctgcagtgaattacaagaatatggaggagaacctgttctcacatttcaacttcttcctctcacctgtggctaagcaaaagttgtctaatgccgggatttaccttagtcctttctccgcagtggtgcattcacaccctgcttgtaagactttagagaattacattttgtacaaagtacttcctacttacttggactccaggttcactatgataggtatcaagaacaataaattgaactccctcaaaagtagaaatccaaaattgcagatggttgagttggtgaatcgttacgttaccagcgcagacgttagtaggtatggtagcgaattcgtctgcagacgtagcgaggcacacgtggggctgaagaggcatgcgcgtgaattgtgcggtccaacattgcatgatttggtgcctcatatgatgaaagtcacgaataaatatgctttcatccatgatgagttgcactactggaagccgcaggaactgtgcaccttcctggaagtgttctccccagaggtcctattaggcactgtcgtttacccaccagaacttttaataggatccaccagtagcctgaataagtggtgctacgagtttgagattgttggctcagattttatgttctaccccgatggggtgaggagtgaggggtatttgcagcccattaatggtgggtacttgctgaaaagtaataaaatatcacttgcaagcggcgatatttactgcgttgatgttatttgcagtaaattcgcacaccatctaatttccattactaagggtgatagaattaccccatcctacagagcttttgcgccgtttgacgcagtgagttactccgcactccaatcaatctcaaggactgcgaggccgtgcatacctgtctcctttgatattgtgagtcgtatttacagatacttgcgcaccttaaagaaaccagataagcaatcggccatggctaagcttagtcagatttcgccggacccctctggtgttgaaatcaagttcgtccaggaattcgctgaattggtcatcgacacagagacaattaggagtactctgaatccgcagcgattgcgaaactttttcggtaagttgggtcagaagttacctggagttctagcatcgaaaatagacgctgtgaaggagatgtgcttggattccttcattgaaacgctcgagccattcacaatagggataaaattaaaagcactatctcatttggagaattttgaggcatggtccgcgcttgatgctgaggcagaggatgattttgaattgcccgaaaatatagagatgcagtttatccggggaagaacgcgagctgttccggaacgcgtggcacgggggtatgtagggttgcccatggattgcggtcgtggtagctgtagaagtacatgggtctctagagagctagtcctagagtacggaagtgctgcagtcacacggggcatgagtgtggttgaaagggagcaatgcactgcttctttagttcaggagaaatgccggtcaatgttcaaaacctcgctgtacttcgggctggcagcgatcgagctagttggtgacttggatgagttgagtgtggagatggccaagcggatccaaagaaaggctagggggccgaagcgctgtgatatttacaccatgggactacggtggttcttctcaggcgatgcagctgacacgaaataccttacgcagtggggcgaacatgtggctgtggtgccagaaatcggcaggaagtggaaaatgtgcgttaatgaggtatgcagctcgaagttcaaattacgcaaaactaaaaacactagaacttatacacaattgcttaaacatgtgaaggtcgataatcaggaaagtgagcatgcacgagatgggaaccccacggaagcagggtctagcttggcagattgtagggccaatgtgtgtacacagtgcgttggtatggatgcgctaagaagtttggcttacaccgaccatatgtttaaaatgccttgtgagacagaatatggtgtcgtcggatggtattcacgtggagaggtgatctgtgcattggatgggcatgagtacaaaagtctgggctggccggagtggttacaactgtggtgtgccgccaacgatgtggcccaaaggtatgattgctgtctagtgcagaagtttgcagctgagaaggacatcgtcggctcaatggttagcgcggagcaagtggaagacgcagagggagcactttgggttaatctgcaaggcacactcaaatttggcatgaactgcacatccggcaagttcgaattagggctcaaggaatttgagtgcttagaggtcggcaagcgctccttcgagggacacagcattgggagtgctatgtgcactggcaattctttgagtgcacgttttatgtgcttaaagaccgccaatagagtggacacaatagccatggagcagcatgaagccagcggggcacaaccggaagtggacaaaaatatggcaatccaaccagtgcctcggccactctacagcacggagttggaaaaagtaggggaatgcacacgcactgcaaataaatggctgtatggcagcaattttaaagttgttgagacccctggtgatggttcatgcttttggcattcactgtcttactttatgggtgtggcagcagaattgatcaagtcgcgggcagtcaagcactcctttgacagcgaggtgttgaacaaggagttaggcattagtgctagggagaatgcttatgccactgatgcgagcatatttgcagccgcgctagtgcataggttggagattcgggtgctggaggtgagttgtggcatcctgcattgcttcactgtggataatccaagacagatttgcctcatcaggctgaatggacaacacttcgaaccgatcctactcaaaaatggatgcgtaatcactgctgttgcgaaactccttggacgacgggatatggatattcttgcagtacttgaaagggaagcatcacgtgagctatgctttgaaatttggagaggtgcgggtgtcagtatggcatcgatacaatcagtctttgccattttcgatatccgcggagttgtgaaggggcaggagaataccactgtgttgaatgcacaaggagcatttgagggcctcttctcgctcaaggatgatcacctggagtatgtaggcaggaaaaaggatccttgctgtgaacccctactggtgactaacaacgcaaaggttttcagagcagctgaccttgataaactgatgcaaggtggtactatgattgagttcaagattgagcatgctagggcgaaaattttggctgatagctttcattctggtgggacaggcgtgctgcaatctgagattttcaatgctaaagcaaatttcgccgagcggtttaagcgccctgacggcacattggttgagatttgcgtcatatgcggagtattcggctcagggaaaagtcacggcttccttgaattaatgcagcgatcgagtgggaagatagtggatttcgttgcgccccgcagagccctgagcgatgagatgcaaaaaaaactggagatccctaagacaaagcggaaagctgggcaggaaaattggcgaatttgcacctttgagaagttcttagatcgctgtgcttacttgataccagggcaattggtgtgctttgacgaattccaactgtatccacctgggtattttgacttgtgtttaagtttgagtgtacctggggtgcactttgttctacttggcgatccttgtcagagtaactatgataatgagcgtgaccggggtaatttcattggtatgcgctctaatgttgacaaaatcttgggaggacgagagtataaatatgtggtgctatccaagagattcttgaatgctaatttcctggggaggatacctgccgaaattgcagcggaacaattgtgccttacagaggagcatgtgatccggcaaggcgtggagtacattactgatgtttgtgctgattttgataacgtagtgttggtgagctccttcgatgagaagaaattagtttacagctatgtaccactcgcaaaagtgtacacgttcggagagagcacgggcatgactttcaagcgtgggtgcattttggtcaccagtgtctctgagcgcacgagtgaattgagatggttaacagccctaacaagatttcgggagaacatcagttttgtgctctgcgccccactgcacctccaaaacgtaatgcttagctaccgcggtcgatgcttggcaaaattcctagctaaaacagccaaggtagaagatctgctccaaattctacctgggaagccggactatcagatgtcgtacagtcggctaattgggaaggatgaaggcgttcgggaggaaaaattggctggggatccatggctgaagggcatggtggatttgatgcaggcggaagaccaggaggacgtggaggtcttgcaggaaatctgcgctgaggagtggttcaagacccacttgccaagggatgagctcgaaagtgttagagcccgctgggtgcatcggatcatggctcgtgagtttagagagtgcaggatgggccatttggtgtctgagcaatttactgatgaatacagtaagcagaagggtgggatggaattaagcaatgctgcagagcgttttgaggctatttaccctagacaccgagcttcagatacagtgaccttcataatggcagttaagaaaaggttgagattctctaagcctgccgtggaatgcgcgaagataatgaaggcacagcagtatgggaaatttttgctcgacgagttcttaaagaaagtgccgctgaggcgcgcacgcgatacagtcatgctcgagcaagcacggcaggagttttttgacaagaaaacctcaaagagcgcagcaactattgagaatcactctggtcgttcgtgcagagactggctgattgatacagcgcagattttctctaagagccaacattgcacaaaatttgacaatagatttagggttgcaaaggcggcccaaagcatagtgtgcttccagcatgaggttctgtgtagatttgccccttacatgcggtacattgagaaaaagctccaccaggctttgccagataaattttacatccattctgggaaaggcttagaagaattggattgctgggtaaagaaatacagattcgacggggtctgcactgagtctgactacgaagcttttgatgcttcgcaggatcaatatatagttgcctttgaggtcgctgtgatgaactatttgggacttcctagagatcttgtgagagattacctgtacattaaaacacacttgggtagtaaattgggcaattttgcaatcatgcgtttttctggggaggccagtacctttctgttcaacaccatggcaaacatgctattcacattcctgcggtacgacattcggggggatgaggccatctgctttgcaggtgatgacatgtgtgcatcaaggagattacgcatcagagacgagcactcccaattcttaggaaagcttagactcaaagctaaagtgcaatttaccaataagcctacattttgcgggtggaacctctgccctgatggtatctacaagaagccacaactggttctcgagcgtatgtgtgtggctaaggagaataataacttggccaactgtatcgataattacgctattgaggtggcatacgcttacagaatgggtgaaagagccatcaacagaatggacgaggaggaggctgcttcattctacaattgtgttcggatcattgtccgcaataagcacttgctgcgatctaatattcgtaacgtgttcgagctaaatactctagtgtag

SEQ ID NO: 681 - DNA, 5946 bp, Hop latent virus
  source 1..5946: mol_type = other DNA
atggctctaacatataggacgcccatggaagatattgtaatttcatttgaaccacaagtgcaatcactgatagctaatagcgccgccgagctgtacaagaatctagaaaaagaaaactgcaagtacttcaattactatttgcctgctgtggcaaagaaaaaattgagtgcagcaggaatatacttgagtccgtactcagccgtggtgcattcgcaccctgtttgcaagaccttagaaaattatatgctatatagtgtactcccgaactacctagatgggaagtacttttttgttggaattaagaataaaaaaataaatctgttgaagtctaggaataaaaagttggaaagtgtgatatgtatcaatcgcttggtgactagcgctgataggttgcggtactccaatgattttgtgacctttgagtccgtatcgcatgaagacctcagacgccatgggcctggcttgagcgaacctgcgctgcaggggataattgaaccgctgaagcggcggaaggccacgcatctcttcctgcatgatgagttgcattactggggtagcgacgacctgtgtaatttcttgcaggtggtgcgcccagaaacgctgttggccacgatcgtgtacccacctgagttgttattcagacagaatagaagtttgaatgagtggtgttacacttatgaggtaaggggccaaaatttgttttttttccctgacggggtgcgctcggagggctatgagcagcccctcaatggtgggtatcttttgggctgcaacaaagtcgtgttgaaggatggaagtgtgtacatggtggacgtgctctgcagtaaattcgcgcaccacttggttgccataactagaggcgctgccgttacgagtatgcatcgatcatttggcccgtttgaggcttgcagctctgacagtctggcgaaattgtgtccagattaccctgtgtgctttccggtgccgcacgatgtggtgaacaagatctaccggtacctgcgcaccttaaaaaaacctgatgtgcaatccgcaattgctaagctgagtcaaatcgtgagtgagccaagcgggcgcgagatagattttattgaagacttttccaaattggtgattaaaaatgaatctttcaatatcaccattgtgcctgaaaggttacggcaattcgtaggcacatggttgggtcggctaccaagtgcgctagcctctaaactcgaacaggttcagagtttatgtctcagtgaattcatcaaaagtttgaagccccacaatttcacgattaagttggaagcactaaagtataaccacctctggaatgatgtgcgcctgtgggttagcgaggaagggctagaagattattcgatagagggcatagatgcaaagttcacaacaggttcgcatgtgccaccacgagttgcaagcccatatcagggcttggcacacttttgcgacagagcatggaagcctttactcctagtggataaaaaaatgcttagctcagtactaaagcgtctagcagtacagagattccgaggtgagcatcgcaggaggatctccacagctgagctggagtcttttgtggatagcttactagaaagagctaaattgattcaaaaacaaaaccgaaagggcagttttagggaacgtatagcagcacatcattatctcaactatgacacaattagggatgcagctagagccatagcttcattatgcatgcgttgggttagggccttattctcagaattgggaccaaggtggtttttgcgcttcaaccgatcgaacttgatgtggttaccagcacctagcgacgcaatattgctttcaagagaggcagaacaaaattgggcggaagtagtgcggtcaatttgcacccagttggggaagtcgagctattcttggggacagctaaccaggacgacgccggcagaggagctacctcgtgccactgatacgagcggcatgctgcctgtagctgctagcgtaggacttgctgagctttcacgtgcaggcactctcggttgcagctgcggtgtggccatggacattagctctatatcggttgctgagcacccatttgtggcacgggacttccttaaaggtcggaaggctggttggtacagcatgggggacgtaccttacacttacaatggcgggagtcacaaatctcagggttgggattctttactacagatgtggtgcgaggccaatgcagtagacccaaagtacgatagttgtctgtatcaaatctacacagaaggggcagcgcttggttaccatgcagatgatgaggacttgtttgagcagggtgaaagtattcttacacttaacttgagcggcgcggcagagttcggggtgaagtgtaagaacggcaaaggctcagtgcatctacggggcccgcaacaatttgagatgcctgctggattccaagtcacacacaaacatagtgtttggggttgtagcaggcaaagggagagtgtgacattcaggtgtttgcgcaagtcacgtgctattgctcaatcggtgcctgcaagcgcggcgcctgagctgctatatgagcacgcagttgaagcacagcaagttttggtggagaaggctgaaaggaatgccgatgtagtggcgtacaagctgggcagtgtggatgtgaatgtttgtgaggcgctgtgggaaactgtgtcctacgccgcgctggatgtccctggggatggttcctgcttctggcatagtgtgggtctactactaggtctcaattcattagagttgaagcggagatgtgtggggtaccggtttcacgctgagggactggatgctgaattggacaaggcggcacaagatggggcgtatgcagatgatacgtgtgtggcagccacagtggcagttataaacgtgcaaataaggatctggaataaggatgtggacaagctatttacgttcagtaaagcggacgttgacaaagtaattgacctgcagctggagggagaacattacatgcctatgctcattcgcaacaactgcgtggtgagagctattgcagatggattaaatagattggaatgcgaggtgcaacatgtgctggaaaggaaatgtgcaccagtgctgcttgaagatttgcgcaaaggtcgagggttggaacccatgaatttggagctggttttttcatgcttcggagtgtgcgcactggtagatgtgggtggccggactgtcgtgtacaatgaaggaggcggcactcacatgcaattcacactgtataatgagcacttaagttacaatcctaggaaaaagaagcctagcttggacctagtggcaggcgcaaagcatggcaagttgttcgcagcatccgtaatcgagtcactgcaagctatgggtacaatgattgcgcgtaagcctgacatcacaagcgcaggcctattggcggatagcttcttcgaagcaagtaccggggtcttgaggtctagcctgttcaatgatcagagcaatttgcgcaaagcctttattgagaatgccggggaagagagtaagcccatctgcactatactcggcactttcggttcaggtaagagctacattttcaagaaactcctcagtggcggtgcgggaagggcgtttgactacgtctcaccaaggcgggccctggcagatgaattcaagcggagtgtgggcttggtaaagaaaaagggcagccagaaagtgggccaagagaattggaaagtgagcacatttgagactttcctggacagagcgagtcatttgcttgaggggcaagttgtggtgttggatgaggtgcagctctacccgcctgggtacatagacttgattctctgcttgctgcatgtcccggtgcatctcttcctcataggggatcctgtgcagagcgattatgataacgagaaagatcgtgctgtgttgtcttgccttgcggagtgttgcacagcactcctccgggatgagacttataagtacaacatgcggagtaaacggttttgcaataggaactttataggccgcctaccctgcacaattttggaaagtgattgcaccactgaagagccacatgtcctgcgtgcgcatatagataatctagcagatttggaaccagcatacaccgaggtgattttggttagctcttttgatgagaaggttgtggcccagagctatcagtcgaaggctagggtgcttacatttggggagagtacaggcctgactttcgactatggcacaatactcataactagtgtggctgagcgagttaatgagaaacgctgggtgaccgcactcagtagattcagaatgaatttatgttttgtgaattgcactagcatgagttatgagcagttggccgtaagatacaaagggaggttcttatgcaaattcttatgtcgaggggctagaactgaggatctacagcagctgttgcctgggaagccacaatttactgaggagtacagcaaggcaattggtaaagatgagggggtgcgtgaagcaaaggttgcaggggatccatggctaaaaacgatggtgaatttgcttcaagcacctgatatgcaggaagaagaaatagcagagatggcattgccagaagagtggttccgtacgcatctgccgcgtgaagagcttgaaggtgtaaggagtcgatgggtgcataaaattcttgcaaaagaagctcgtgaagtgaggttgggggacattgtatccgagcagttcactgatgaccattctaagcaaatcgggggccgccagctcacaaatgcagctgagcgcttcgagactatataccctagacaccgcgccaatgacactgtgacttttatcatggcggtaaggaagcgcttgagtttctcaaaccctgcaagggaaagggcgaagttgcatgatgcatgtgtgtatgggcgtgcgctcttggatgtgttccgcaagcatgtgcctctcaggccagagcacaatcataaatttatggaagcagctttgtggaactttgaagaaaagaaattgagtaagagtgcggcaactatagagaatcatagtggtagatcgtgtagggattggcctattgatatggcccagatattctcgaaaagtcagctatgtactaaatttgataaccgattcaggctcgcaaaagcagcgcagagtatagtttgcttccaacatgcagttctttgtcgctttgcgccatttatgcggtacatcgagatgaaggtgcatgaggtacttccagctaggttctacatacattctggcaagggattggatgaactaaactcttgggtgaagggcggaaagtttgatggagtctgcactgaatcagattatgaagcctttgacgcatcgcaggatgagtttataatggcgtttgagcttgagctaatgaagtttttgcgcctcccacatgatatgattgaagattacaagttcatcaagactagcctcggttcaaagttgggcaattttgctataatgcgtttctcaggcgaggcgagcacattcctctttaataccttagcaaatatgctatttactttcatgaagtatgagataaaaggggatgagtacatttgctttgcaggtgatgatatgtgcgcttcaagggaattgaaagtcgttgggaaatacaagaaattccttgataagttaaagctgaaggccaaggtccaaatgacccaaaagccgacattctgcggttggcacctctgcccagatgggatttacaagaagccacagttggttttcgaacggatgtgcatcgcgctagagttaaataacttggccaattgtatagataattatgctatcgaagtggcttttgcatatcgtctaggagagcgtgctgtgaatcggatggatgaggaggaggttggtgcattctacaattgcgtgcgtctcatagtgaggaataaacacctgcttaagtctgacgtgcgcgcagtgttcgaggaaagtcctgtgagttga

SEQ ID NO: 682 - DNA, 6000 bp, Kalanchoe latent virus
  source 1..6000: mol_type = other DNA
atggcactcacatacagaagtccaatcgaggaagtgttaaccctcttagaaccagcggcacagtcgctaatttccaccaccgccacaacaagttaccagcagaatgagaaggagaatttccaatggttcaattacagtgtcacccctattgccaaggagcacttgagcaatgcaggcatctacttgagcccttattctggctacccacactcacaccccgcctgtaaaattcttgaaaattacatgctctacaaggttcttcccagcattatcaacaacaccttttacttcgttgggatcaaacaatttaaattgaatttcttgaagaagcgtcacaagaatttaagcttactcactgcgatcaataggtatgtcagcagtgccgacaagattcgatacggcaatgaatttgtcgttcgtgagagtagtgagtcgagattgttgaagaggcattgtggtgttcatgaatcagccaccctttctgctctcgtacctaacgttaagacgcacgcaaacttattcctgcatgatgagctacattattggagtaaggacgatcttatcactttcctggagatttgcaaacccaatatcatgctaggcacgctcgttttcccgccagaaatctttattggagctacgacatcactcaatcgatggtgttatgacttcgaggtacgcaaggacaagctcttcttcttcccagatggggtacgttctgaaggctacgagcaaccactaaatggcggctatcttcttcaaacaaatcagatcgaattgcctgacggcactgtgtattgtgttgatgttattgcaagcaaattcgcgcatcacctcgtcagcataacaagagggcagttggtcgtgcccacatatagatctttcggtccatttgaagctgtgcatgttggggccatgaaagacatctcacggggttttaaagaatgcataccaatttctatccacactgtcctacgagtctataggtacctccggtctttgaaaaaaccagataaacagtcagcgatggcgaaattctcgcaattaagccacgaaccaagtggcatggccatcaagttcatggaggagtttagcaatctagtcattaacaccgagagtatccgcacaatggtgcagccggaactgattaagacattcttcggcaaccttggacgcaaacttccaagctcactcgcagcgaagattagcgtaactaggtctgtgtgcttagatgagttcatagggttccttaaacctctttgcgtagatctcaagcttaaaagtatgagtagaagtacacttttggatttctttccattagtctgtgaggaagaggaaggcgtagatctcgttgacgcctatgatrataactggaatggcgcaggcatgtttgctcgagaaccacggccatacattgggatggcaccgatcattgacaatcttgagaaattcaggctttcgttgaatttggatgccatgcttcaaggcctcatggatttacatctcaaggcaaattactgtaggtgcacaggctttacgaccacactctgggattacatcgaatccctccgaagaaatgcaacgatcatcgcacaagcattcctgcatgttttaagtcgcgctgcaattgagaaggcggacaagtggttgcacgctgtttatgtacgtgaagtgggttttcatgagctcaagcataagtggttctcacagcgtaccagtagaagctgcatgaagtacctcgcatgtccaaccgaggaatcttatgtccggcagttcgaaagtactacacacatgaaaccacccatgaagggggtcgtgctcaggaaattcagcctcgatgattttgatgaggatttgtactacaacctttctaatgatctaagtacaccctcgttagtacagaggcaatcattaggccccagcgatccggtatctccaccacgttttttgggccctaccactcatgcacacttcaaggcatactccattgatgaactggatgaggatcaatattacaattttgagaagcatcaaatcactccagttcgggtcacaccgcaagaggttagatgcgaagccctcataccggcaaagcaagcagagcagaaccgaagcttaacttgcaagtgtgggattaacttgcctatatgcaaattgaagttcaatgaggaattgcccttcgagttcactgatcaattaaagggcagaagtggcgcctggtattctctaggaaatgttgactacagctacaatggaggagcgcataaatccaaggggtggccgcagtggctcgcgctgtggatgaaggtcaattctatcgatgagaagtatgattgcgttctcgtgcagcaatacgcagccaattgcgcgataggtttgcacagtgatgacgagaagatctttagaaggggtgaatcgatctgcacggttaacctcattggtagtgcccagttcgggatcagctgtggggttgttacgtggcatgaagttgttcaaggggatgtctttacaatgccaatgggctttcaagaaaatcacaagcattcagtgcagcacacaacagctggaagagtttcacttacattcagagtgcttgcaactgcacagagcttgccacgtattatgccacatgttgaatcatcatcaagtgaccatgaaggcccctccacggaggcgcctaatcaaatgggtacaaaatttgaaatggatggggtcacaatttcatgccgcaagctacgtgttcacccaaagtgtaaagtcatcaaaaactctggtgggggtgactgcttctggctggcccttgaatatttcacaggagttactatgaaggacatgaagcaggcgattaaacagaatatgtgtgacggaaattcagaacgccttgaagcgcaaatggggccacaagtgtacgccgaagacgaagcaatatgcgcagcgtgcaagcaatttggctttgacattgtggtttacgaccatatgcaaggcggggtgatcacatactcttccgttgataattctaaatgtgcgttgatgaagcttgcaggctcacactttgaagcgctggttcctattgaaacttgcacgattaaagcgcttgctgagtgcctcaaacgccgggagattgacattctcacacttgttgctaaagccatggggcatgaatttcttgagagccttctagctggcactggtttaaccattgatcaatttagttgcatggctacgctgcttgggattaactcagttgtcgagatgaatggggaggtcttccggttcaatgtagaaggtaacatctgtggactcttcagatttgagaatgggcatgcaacctttgtacaaaagagacctaccgctgcgcacgtgcatactaatgtggctgtgcacggtttggagatcaccgaccgcgagttgctgccaattacatccattagttctaaggtagaatacactccagatatctctcgtgctcagcttttgagtgatagcttgaatcaagggaccactggggtgctttgttcggaactattcaatgaacagggagtccttatgcccgctaatcctacccgtgttaaaaggagggtaaatgtcgtgctaggtgtttttggatgtggtaagagtcactccatcaggcaagtgctcgcgaattcaccaggtcgtgcaatcatctatgtgtccccgagaaagttcctgaacacacaatatgagagctatctgacatctttgaaggaagctaagggtggggagcatgtcaaaaacttcaagagtttcacgtttgaaaaggcaattttgaaaagcagtgccttcctgccaggggctctcgtagtctttgatgaggtgcagctttttccaccgggctttatggatctatgcttctgcagaatggctgaaaacatacacgttttactgctcggcgatccatgccagagcgactatgactctgagaaagatagaaatatattaagcgcgctcggcccagacatcagcaacattctcaaagaccaaacatacaattacaacatcgtcagtcagaggtttctcagggactgtttccgaggtagattgccctgcaaatttggagtagagctcaagaaaggggaacaactacaattgatcgagggtcttgatagcatcgacgctagcaagtcatacgctaaagtgtgcttagtctcctccttcgaggaaaagaagatcgctagtgcataccttggagcgaagtgcaagatttacacttttggagagagcacaggtgctaatttcgacgaaggctgtattctcatcacatctgtagctattttcacaagcgagaagcgctgggtcactgccttaagcaggttcaggatcaaggttgccttaattaacgcaagcagtacaagctgggatatcctctgyaagcagtacgagggccgcacacttgggcattttctctcgaagacggcaaagcctgaacatctacagagtattttaccaggcaaaccgctgttcactgagggctttctcattgaacgatttggctcagacgagggcaagcgtgaggaaaagctgcagggtgatccctggctcaagactatggttgacctcctgcaagtggaggatcaagaggatattgaggaagctaaggtcatcctacatgacgaatggtttaaagtccacctaccccaatgcgaaatggaaggtgtgcgcgctagatgggtgcacaaaattatggcaaaggaattccgagaaaaacgcatgggtttcctggtgtctgagcaattcacagatgaacattcgaaacaaaagggtaaagaactcacaaacgcggcagaacgctttgaaagtatatacccacgtcatcgggctgccgacactgtaacatttattatggctgtaaggaagaggttgcgtttttcagacccaatcaaagaagcagctaaattgaatcaagcaatgccctttggaccgttcctactgaaagaattcctcgctcgggtgccactaaagccgatgcacgacgcacgtatgatggctgaggccaaatttgactttgaggaaaagaaaacaagtaaaagcgctgcaactattgagaatcacagcaacagatctatgcgggagtgggctattgatatcggtttggtcttctccaagagccaactttgcacaaagtttgacaatcggtttagggatgccaaagctgctcaaactattgtttgtttccaacatgcagttctgtgcaggtttgcacctttcatgcgctatatcgagaagaagctgaacgaggtgctgcctgagaagtattatattcactctggtaagggtctggaagagctcaatgcatgggtcatcagaggcgagttcaaagacacgtgcactgagtcagactatgaagcctttgacgcaagtcaagatcaatatatcgtggcgtttgaggtgcatcttatgaagttcttggggttaccaaatgacctcattgaagactacaaattcatcaaaacgcatcttggttccaagctcggatcatttgccatcatgaggttctccggcgaagctagcactttcctattcaacactatggctaacatgctgttcacctttttgagatatgacattaagggcgctgagaggatttgctttgcgggtgatgacatgtgctcaaacacgagactgcatgtgagctcgaaacatgaaggtttcctcaagaagttgaagctcaaagcaaaggttgctcatacagtgaatcccactttttgtgggtggaacctttgctcggacggtatctttaaaaaaccacaacttgtctttgagagactttgcatagcgaaggagaccaacaatctggtaaattgcattgataattacgctatagaagtggcgtatgcttaccaaatgggagagaaggcggtygcgcgcatgaacgaagaagaggttgacgcattctataactgcgtcagagtcatcattaagaataagcatttgcttaaatctgatgtccgccttatttatgaatcgggaaaaattcagtag

SEQ ID NO: 683 - DNA, 516 bp, Lily symptomless virus
  source 1..516: mol_type = other DNA
aagctcggtaactttgccattatgcgtttctcaggtgaagcgagcacttttctattcaacactatggccaacatgctcttcacttttttgaggtatgagatcaagggcgatgaacggatttgcttcgctggagatgatatgtgttctaacaaaaaattattcatctcccagaagcacgctgattttctaggcaagctcaaattgaaagccaaagtcgctcacactaaaacgccaacattttgcggttggaatttgtgcccccacgggatatttaagaaaccgcaattggtgttggagagattgtgtatcgccaaggagacgaataacttggtcaactgcattgacaactatgccattgaagtcgcatttgcttacaagatgggagagaaggccagagagagaatgaatgaggaagaactcgacgcattttacaactgcgttcgcatcatagttaaaaataaacacctcttgaagtcggatgtccgagaggtgtatgaggagcgagctgaaaggtag

SEQ ID NO: 684 - DNA, 5901 bp, Narcissus common latent virus
  source 1..5901: mol_type = other DNA
atggctctcacatacagaacgcccattgaggatattgtaaatttcttcgaaccccaaactcaggcggtgattgctaatagtgccgccgcgatatataagcagctcgaggaagtgatctgtcagtacttcaactactacatgcctgctatggccaagcgtagactaagtactgccggtatctacttgagcccttattctgccgtcgcgcactctcatcccgtctgcaagactttggagaattacatattatataccgtattgcccacatacataaataataagtactttttcgtaggcataatggagcgcaagctgcagctgctcaagaatcggaatagccatcttgatagcgtgcagtgcataaataggtatgtaactagcgcagataaaatgcgctatggaaatgatttcgtggtgttcaattcgcaccccaatgaatccctcggccgccatggcaaggggctcactgcaccaacgctcaaagacatagtcgaaccgctgcagcgccggaaagcaaagcagctgttcctacatgacgagcttcaccactggagcagtaagaacttagtcgacttcctaacccatttgcgacctgacactttactcgggacactggtgtacccccccgagttactatttaaacaaacccggagcttgaatgagtggtgttacacctttgagatcatcggtggcacattcttttattaccctgatggagtcaggagtgagggttatcagcagcctcttgccggtggtttcctactgaagacaagtaaaatagtactggaagatggtgactgctacatggtcgatgtgctgtgcagtaaattttcacaccatttggtctccctgacacgtggtgaggcaatcaactgcacgcatcgatctttcgggccattcgaggccacagcttctgaggaattaactgccctcagccctgaatatccaatttgctttccagtgtcttacgatattgttaataaaatctataggtacttaaggacactgaaagaacctgacgagcagtcggccatggctaagctgagccagatagttgccgagccgactggtgcagagatcgactttgtcgagggtttcgcaaggctcataatccgccagagtagcatctgtagcactattctacctgataatttgaagctatttctgggttactggttgtcgaaactcccgccaattttagcggctaagatacaaaatgtgcgcgagttctgcgtcaaccagttcattaaaagtctgaggccatacaactttacggcaaagttatgtgaagttaagtggtatgataactgggagaattccttcgactggttgatggacactagcactaatgccgacattgtgtcattgctggactccagcttcacctcaggcgcgcgcgaagctgtacctagatgggttggggccccttacactggattagctccagtacacgaacgcgcttggcgtagtttactaaaaatcccagcacgccatttattcgcctgcatccggcgcatgtactatcacgaggtcttctgcgagcacacacgtcacatatcgcttagcttcgttgaagaatttgtacattccaagctgcggtctagcttccttatcgctaaagagcgtcgtatacacaatagcaagactcacgtacccatctttgagttactggggtttgcaaccaagcggcatttgtttgtagccctgcgtagctcctgcgcaaggaaaatgcgctcttccttcactgaagctggccttgattggttcagcgatttgagacgctgcaaccaaaaattcgtctccaacgtgcctgatgcaactggggtacaccctgcactcactaagccatggaaggtcgtcatcagggatgtgcttgagatgccgcgattcaagaatagtaatattaagcaaggcgcttcaaccccagcatcttcttcttccataccaccgaaatcaataactgcaccacctgagcagaaacaacagtgtgcacagtcagcacttcaactagcttgcgcctgtggtctgagtttgcctgtaagaacgctgttgtttgctgaccatgctctcaaagcgccttacgacctgaaaggctgtactgctgggtggtattgcaaggaggacgtgcaatataattgccctagtgggtctcatgccagccttgggtggcccacttttctagatacttggtgtgaggtcaatgaaattcctgcaaagtataatagctgcttataccaagtttacaaggctggttcctctacggccttacactcagatgatttagggatgtttatccctgaggagggttttctgacagttaatttggggggatctgctacgctctcaactgagtgtagcggatcagttcgcagtgtagttctagatggcgccgtcttctttgaaatgccccatggattgcaaagcactcacaagtacagtgtttctgattgctcgccagggcgagccagcttaacgtttcgctgtgtcagcatgccaccaccagcccaattggctgggtccgggccacaaagcccaacgcatgaagctgctacacaatgcacgtctggtggtgctaaagcacaggaacttaccattgggggagttaagctcaccacagtcacgcagccaactaaggctaattatagggtgcatagtgtggccgcagatggctcctgcttttggcatagcctctcaatgctctctgggctggaaagtcagcaaatcaagaaactgtgcatgagtcatagcttctcggaccttgcgctcaacgctgaactcgccgagaatgctaaattagatgcatacacaaccgatgtaggtatctgtgctgcttcaatcaagctcaggactgaaattagggtgtggaacatgagcacaggtctgattcatctttttgtcccccgcaaatcaactgcaatcatgaacgttaggctctctgctgcacattttgaacccatttttttgcgcaacggatgtgtggttcaggccattgctgctgccctaggacggcgagaggctgaagtactaaaagttatcgagacaaagggcacaactgagctctgccaacaactttgggttggcgatggcttagaccttcttttggttgagttggcattcaaatgcttttccattgtggcgcacgtcaactttggtgaaactgagagcattttgaattcggatggcaccgctcactatcaatttagttgctccgaagggcacatcacatactgtgggcagaagaaagatccaggtgcaaccctgctagctaagacccctcacaacaagagtttctcaccagcagcactggagatgctcaaatctagcgggttagtcatagagtacatgccacaaattgagcgggcgcaagttttggctgatagtttgtttagagcctccactggtgtgctgcaatcggccctgttcaataacaaacagaatctgcgaggccgatttcgccaagtgcacgcaataccagtttgcgtaatagctggcacatttggttctggcaagagcacactcttcaaacgcctacttgaacatggcagtggcaagatttttgactttgtgtctccacggcgtgcactcgcagatgactttatggctcaggttgggctatccaagggccggaagaatatcaaagtggggcaggagaactggcgtgtacatacttttgagcggttcattgaccgcgtaccatatctcaatgagggccaggtgcttatttttgatgagatgcagttgtaccccccagggtattttgatttgatctttcacttagctaaggtggatgtgcattgcttcctggttggagacccatgccaaagcgattacgatagtgaacgtgatcgcttgacgctgtccgcacttgaaaataacgtgagccagctattggacggtcgggagtacccctacaagatcacaagtcaccgcttcttgaatagaaattttattgggagattgccgtgcaggatagttgaagcggattgtacgctcgatcagccgcatgagttgcggatgcatttggagaatatgccgaagcttgaacacaagtacttggaagtgttccttgtgagttcgtttgacgaaaaaacaatagtttacagctaccttccggatgctaccgttctgacgtttggcgagagcacagggttgaccttctcttacggcacaattctcataactagtatatccgagcgtgccaatgataaaaggtggttaactgcacttagtcgatttcgattgaatgtgtgcttcctgaactgctgtgggtacgactacaatgcacgggctgtgaggtataagggtcgtgcacttgcgcaatttctgtgtaaggcagcttcagaggagcacctcttgaccctgctaccaggaacaccacaattcaccgaggtgtacggctgcaaaatcggcaaagaagagggattgcgcgaggaaaaactacttggtgacccgtggttaaaaccgatgataaatttgtatcaggcaccagatgctttagccacagagttgccggaagaggtgctacaggaacaatggttcaagacccatctgcctcgggaagaactagagagcgtgcgtgcacagtgggtgcataagatactggctaaggagttccgcgaggtgcgcatgggcgacttggtttcaaatcaattcactgatgagcactcaaaacagttgggggctaggcagttaactaatgcagccgagcgatttgaaactatatacccacgccatcgcgctaatgatactgtgaccttcatcatggcagtgaagaagcgcttgagcttttcacatcctggcaaagaaagggcgaagctccacaatgccatgaactatggacgcgcgctgcttaaggaattcctgaagcgtgtaccactcaagccaaaccataataagcgctttatggacgaagccctgtggaatttcgaggaaaagaaggtgagtaagagcgcagctacaattgaaaatcatagcggtagatcttgcagagattggccgatcgaggtcgcgcaaatattctcgaagagccagctgtgcaccaaatttgataaccgattccgcgtagctaaagcagcgcaaagtatagtttgctttcagcatgcagtgctctgccgttttgcgccatacatgcggtatatcgagatgaaggtgcaagaggtgctcccacgcaacttctacattcattccggcaaaggtcttgacgagctaaatgcatgggtgcgccgtgggaagtttgatggcgtgtgcacagaatccgactatgaagcattcgatgcttcgcaggatgaatacatcatggctttcgagttagagcttatgaacttcctgggtttgccgcatgatctcatagaagattataagtatataaagaccagcttgggctctaagttgggcaactttgcgataatgaggttctctggggaagccagcacatttctctttaacactctggcaaatatgcttttcacatttttgaggtatgaagttaaaggccacgagtttatatgctttgccggggatgatatgtgtgcttccgctcatctacggaaaacggagaagtacagcaagttccttgataaattcaagctcaaagctaaggtacaatttacggccaagcccacgttctgcggctggcacttgagccctgatgggatctataagaaaccccagctggtgtttgagcgcatgtgcatcgccatggagctgaacaacttgagcaactgcatagacaactacgcaatcgaagttacttttgcatataagttgggtgagagggcacttaaccgtatggacgaggaggaagctggagcattctataactgtgtgcggctcatcatccgcaacaagcacctgctcaagtttgatgtgcggactgtgtttgaggtaagtgattgcacctag

SEQ ID NO: 685 - DNA, 5622 bp, Nerine latent virus
  source 1..5622: mol_type = other DNA
atggcactcacatacagaagtccaattgaagatgttatttctagctttacttcatccgaacagagtcttataaccactaaagctgtaagtgcatacaaaggtaaagaggatgagttgtttgatttcttcaattatgctttacccattaaggcaaaagagaagctgatcaacgccggcatttatcttagtccttacagtggtatgsyacattcacaccctgtgtgcaagactcttgaaaattatatgctatacgtggtggctgcaccactcttggaccagagtttctatctggtttctattaaaaaaaacaaactgagtttgttgaagagacgctgcaagtctcttgaaactgttgagtacctgaacaggttcgttacaagcaaagatagaatcaggtattcaaatgattttgtaggggttgatgcagaaatgccatcaacctcttacgatgcttgtgaaaggagaaggaatataatgttcccaagaaattttcaagggaaatcycggaaactcttctttcatgatgaaatacattactggtcaagaaaagatttgatttatatgcttgaacagtttcgaccagaatgtatactggctactctagtttgtccacccgaaatcttggcaggatctaaagaatccttaaataagtggtgctatgagtacaagatagatgggggaaagctacattactaccctgacggtgttcactctgaaggttacacccaacctttggacagctctttcctgctcaaaacgaaaaaaattcaattagatgatggtgagacttactgcgtggatctcatacattctaagttctcccatcatttgatttccattaccaaaggtgatgctatcactgatgatgttcgaacttttggtaattttgacgcagtatcagctgggcatcttaagcctcttgggagaaatatcggtcaagctttccccattagtattaatgtaattagtaagatctataggtaccttagaactctccaaaaacctgatgtgcaatctgccattgccaagttaggtcaactyttagttgatccaactggttttgagatcaaattcattgaagaatttgcacccttggtaattgagactggtaaaatgcgctcaatactcatgcctgatcttttgaagatttttaaagcagacatrtacagggttttaccagacttttttgcaagaatgctgaaggaaacaagtgaagtgagtttggataagtttatagccaatctggaaagtttcaatttccaagttaagctcataactttagattcgaagattcccatttttcttcaatttcaagaagaattttctgrggaaagtgctagtcatgaacccctcatygatgacacttttaatggcacgatttcctacaatcttaagaagatcaaaraggcagaagaacttgagagaagcaagtttttgggyagtaggcatagtattaggttagcttcwgatctagctgctaaacttttcgcttttattttttatcggagtttctctgattctgatggtcggattaaatcttgttggtcaaaaattggcggtacatataaggccttacaaaaaagcaaatttgggttcttgatgaaggaagcaacctttctggatgcacgcagcaagatcgaatggagactaaggagccttaatttccgttatggaaaaatctacttctccgaaaataatttaaggtggtttcttgaaaaagtaaggcgtttcaaccagaaaagtctctgtaacgctgagtgtgggttattgccttgttcaaaaaaagcttacactcaagtactagccgatatttgtaagttaagaaagaaggaggaccataaaaaaatagatttggatgatggggaaaagcaaactkcagaaggggaacaatggtacattgaagctgataatgagaaatttggcgaggccatgaaactttgcgaaatggcctacaattttgatgaacaccagggtgacccgtctttggaaaccttgtcaaccttttcagacatcatttctggagagactcattctwgttttatttgttttcagcctgtgaataatatagatctttttgacaaattctttttctttttagattttacccagaattttatgggkgcctgttttgagggttttaaaatgtacaaattcttgcccaattccgtwacattaagtgattgtgcgaatttaattttatgcgagaatcttgtggaggctgtcgctcctgcaaaaatttcagtagatgaaagcyctgctgaaggrgaagtgagggaagaaaaagaagctgaagtggagataatggaaacaaacaattgygaagctgatrggaatgaaccaacctttctccctagctgttttttaactttgagtagcaatagagaatatcttcaagaattcaaagttgttaaaactgtgggtgatggggactgcttctggcaaagcttgggttatttcctaaaccaggatgggctygctcttaaaaaatacgttttttcgaaggttgatacatgctcagaagacaaggaactcatgcgtcagaaaggcgacaaagtctatgctgagcaagaagctataggactcgctgcaaaagtccttcgaatcgacattaaaattatatgcccagaaatgccttttgatattaaagttatgggcgaagaaagcgaaaatcttgctactctgcttcttttgaaagggcattatgacatattgctacccaaggaagactgtgcaatcgtggcagtctctgaaacccttaatagaagatatcaagatgtatatagagtgctcaatagagaagaaaattcatacattttgagggaaatggaggaggagaaaggggtaaatttaaccactttcgaaaggatattatccttattctcaatcaagggtttctgcactgtcgatggcgagatagttgtactraatgatggtggcaactttgaagcttactactgcatttccgaaggccacatatcaaarataaagaagcaaaaattctacgacagccaaaaacagtaccctaaattgtgcaacaaattaacttccgcaatgtcraaagaattggaaaagatagcggacatcattcctttcaccccttccagtrcaagagcgaccaaactcgcacagagctttcacgaaggcagaacgggggttttatgttctgaaatcttcaatggcatgagaaagaaggaggttagtcaaattgtaccgaaayctcagaacctcaatgttattctaggaacatttggctccggaaaaagctcacttttcgtcaaggtgattcaaaatgagagcgaaaaagctataagttacgtgagtcccagaagaagcttggcggacgaatttgataaaagggtgaggaaaaatgggaaaagyaagtataaagctttcacagttttcactttcgaacagtttgtcaagaaaatgacaagattgmggaaagggcaaactgtaattatcgatgaaattcagytatacccacctggctatctagatctygtcttgatctgtacgcagcacttagaattgacttattatatcacgggtgacccttgccaaagtgattatgatagcgaattggacagaggtttctttctcggagacccatccgatatagatgaggtacttaaaggcaaggagtacagattcaatgcaatgagcaagagattcaggaataaaaattttcaaaaacgcttgccttgcaagatgagggaactcactattgatgatgattttataatacttgacggaatgaaggaattcgaagagctcgaacttaaatataaaaaggtgatcttggtgcccggcttcgaagataagagaattttctcgtataatgattcttgcgaagaagtgctaacttttggtgaatccactggcaggaatttcacttggggctgtgttgtaattacscacagttccatccaagtttctgagaagaggtggataactgctttaacaagattttctgatggtatctctctgctcaatttaacgggtgaaaatagcgcaaatcttgagaaaatttttgatggtagggtgcttagaaaattccttttacaaagcgccaatattgaggattttaagaaaatgcttccaggttcgccaatttttgttgaaaattatggagaaaagctcggtaaaaatttcatgattaaggaagaaaaagttagaggggacccatggctcaagggaatgcttgatctcatgcaagatgaggaccaactagagcctgaggctatggaaataataatgcagaaagaaagctgcaaaactcatgtaccaaggagcaatatcgagcacatccgtagttttttcctgcaaaagttaaaggcaaaggagtacagggagtgcatgtttagaaacaatatcaccaatcaattcactgataaatacgagaagggyaatttcaaaaggctaacgaatgcaagtgaaaggtttgaagcaatttacccaagacataaaggtgatgatactgcaacctttttaatggccgtaaagaaaagattaagattctcaaaaccggctcaagaagttgcgaaattcagagcagcagaaccttttggggagtacatgcttggggtattcctyaaacatatcaaattgaataagaatcatgaaccccaaaaaatggctgacgcaaaacgagaattcgaagagaagaaaacgagtaagagtgcagcagttattgagaatcacagtggccgaagctgtagagactggttaatcgatcttggctttcttttcattaaaaatcagctctgcacaaaattcgagaaacgcttcgctgatgctaaagctgctcaaacgatcctgtgtttccaacatgaggtactatgtaggtttgcaccctatgtaaggtacattgagaaaaaattaaatgatgctttgcctgcgaagtattatatacatagtggtaaaaatattgatgatctcaatgactgggtgaaggacaatgatttctcagggatttgcactgaatccgattatgaagctttcgatgcatcacaggatcattatataatggcttttgaagttgcgataatgaaatacctcggyttaccaagggacttaataaatgactacatttttatcaaaactcaccttggytcgaaactagggagttttgcgatcatgcgtttctccggtgaggcaagtacttttctttttaatacgatgagcaacatgctctttacttttatgaagtacgagatcaatggatctgagtccatatgctttgctggagacgatatgtgtgcttccaaaaaattgaggttaagtgatgaacactcaagttaccttgaaaaactgaggttgaaagctaaagtctgtttcactacccgaccaactttttgcggctggagcttgaatagacttggtatctttaaaaaaccgcaacttgtctatgagagaatgtgtattgctatagaaaagaacaatttgcaaaactgcatagacaattatgccattgaagtttcatatgcttacctgatgggtgagaacgctttggtactcatggatgaagaagagatccacaatcattatatgtgtgtacgaactattgtccagaataagaatctccttcgctctgacatttacaaagtctttcagcaggcatag

SEQ ID NO: 686 - DNA, 5841 bp, Passiflora latent virus
  source 1..5841: mol_type = other DNA
atggcactcacatacaggagtccgatcgaggaagtgttaacctaccttgaaccggcggcgcaatcactgattgctacaaccgctaccacaagttatcagcagaacgagaaggagaattttgagtggttcaactatagtatgactgcactagcgaaggaaaagctgagcaatgcaggcatttacttgagtccctactccggctacgtccattctcatcctgtttgcaaaactttggagaattatattttgtataaagtactaccaggtgttataaataactcattttactttgtggggattaaacagtttaaacttaatttcttaaagaaacgtagtaagcatttagacatgttgcaatgtattaatcgttatgtgagtagcgcagataagattaggtatggtaatgaatttgtagttaggagaagtacagaatctagagcactgagaaggcattcattagttgagcagtctgatacacttagggatctgatacccaacgtcccaggttactccaacctattccttcatgatgaattgcattattggagtaaggagcaattgattacgttcttagaaatttgcaagccacaagtcatgctgggtacccttgtgtaccctacagaaatttttgcaggttctaagaattcattgaacccctggtgctacgagtatgaaataaagaagggtagattgctctactacccagatggggttcgaagtgaagggtacgaccaacccctggaaggcggatttctgcttacggccaacaaaatacaattactcgatggcactgtgtattgcgtcgacatcgtgtgcagcaaattttcgcatcacctcgttagcattacgaggggtgattttgttgttcccagctatagatcgtttgggccatttgaagcagtacattcaggccctctgaaagatatttctagagcagctggggaatgcttcccagtgtgctaccatactgtgcttagagagtacaggtacttgaggtctctcaagaagccagatatccaatcagccatggctaaattttcacaattgagccacgagccttcaggcgctgcgatcaaattcatggaagaactgagcaagctaatcatagaaactggggatgtgaggaccgtaatccgccctgaattagtgacaacattcttcggaaatttgggtagagcgctgccagctattattgcatccaaaatcaaatcgaccaggagtgtctgcttggatgaattcataggtacgttgaggccactcagtgtagatttgaagttgataactgtgacccacgcaaccgagattagagtgggtctagatgagtgcgaagctgaagagggagtggaactagttgaaatgatcgatgaaagatgggagggccgcggctcagcattgttcgaaagagcaagaagtccttacagcagcatggtcccactgtatgattgtccgaagcgctggaaagtcgcgtgtgcaagaacttggctgctaaagttgtactggaagcggtatgtaagtgcctgtttttcggagcaagtggggttcagcatgagtgtgggtgagtacgtaggcgcggctctgaacagggcgaaaatgattggtctcgcgcccctacttttagcgactcgggcattagggaaaaggcggggaaatcgcagagattggccgaggcccaaaccaactttgccctatgattgcagtgtccagtgcttgctacggctttccgccaacggagcttggattgcttttcttgagtggcatggacatggcgaaagaaaggtgccgaacacgcccggcagaggcatgatccggggaggcattaggatgacctttttcgcaagaattgcgactttttcgaagaattgtacccttcgtatgccaatcaaacagcccctccgtgcagcacagggcccgtatcactttcagcgcatccttgtatttggggaaaccggagaagaaaggaagtgtagcggggaagtnattgaatgcctgtgtaattcgcacattcctgtgaattctctacttcacgatggggattgcagtgtggagttccctagcaaattggaaggccgtgaggtggcttggttttccaagggtgcggtaccatacaggtgcgctggcagcgaactcaaatcactgggttggcctctgtggctcacgccctggttagagctgaatgggcttccgacgaagtatgactgtatgctggctcaaaaatatgtggaaggggcagagacaggattccatagggatgatgggacccttttcaaggttgaggaaagtgtactcactgtcaatttgcttggtactgctgaattcggcattgaatgcaaaaacggagcagtttggagaaatcttggccatggcgattattttcagatgcctgctggtttccaaggaagccacaggcatgctgtgcgaaatacttctgcaggtcgcatttcctacacattcagagtacttaatgagttaaagagtggcgagattggtgaggcttgcaggccaggtggggaaaccaagaatgagggtggtgagcaatttgaggcctcaattgatggggttaaagtcacgtaccgcccactatcacgcacgaggaagtatagaatcattgggaattcaggtggcggcgattgcttctggctagctatgtcttattttacgggaattaacgtgctggacatgaaagaatctattctgagcagtacttcgcagcacgacaagaggttgcgtgagcagatgggattgaaggcgtgggccgaggatgaggcaatcctggctacttgcaagaaattgggctacgatattcccatgattgatgaagccaaaagtagagatgtggttcgagccaatggtggtaataccctattagccactttgagattcacggggaaccattttgaagctattatgccgattgaaggatgcaccattaaagcacttgcagactgtgtgaagcggcaagaaaaggaggttttttcagtgcttgcgcattcaatgggcagggagtttctgagagaagtacttgaaggtaagggggtgagcttggagcagtttgccactatgtgcaataccctagacgtaagagcagttctagagctcgaggagggtacaatgttggtgaatgaagttggacggatcgagggttactttagcctgcttgagggtcacgcagtttttaaaaagggcaaaccgttagcgagacacacgcaaacgaatgtccacgataaggagttggctctaacagatgaggagctgctaccaatttcgacggtcagcacaagaatagagttcaagccaagtaaagttcgtgcaggcttattgagcgattgtttacatcagggtagtacaggggtactgtgttcagaattatacaacaatcgaaaaccccttatgcctgaagagccgcggttgggcgctagggaaatacacgttgtgcttgggacttttgggtgcggcaagagcacactgattcgtaaggtgatgtgcaaagcccgtagtaaggcaatcatctacatctcacctaggaagttcttgtgtgatgattttcagaggagtatagaagagatgaaaatcgagttcgggaggaaagctggcgagctttttaggagcctcacgtttgagaaggcctcgttgcaggcgagcaaggtgattcctggtgcgttagttatgcttgatgaaattcagttattccccccaggtttcgtgtctttgctttgctgtctcctccatgaggaggtcaaattagcattgtttggtgacccctgccaaagtgattatgattctgagaaagatagggctgtgttgggcgcgttagaatcggacattgtggatataattggagacaggagctacaattacaataccaccagccgtcgctttaggggtgagttgttccgaggacgattaccatgtgatcatgcggaaccgccgagtacgagtagcaagctggtgatcatcgaaggcctcgacaatgttgactgcacagcggagagtagcaaagtgtgtttggtctcatcctttgaagagaaaaagattgtccaagcttactttggggcaaaatgcaaggcgctaacttttggagaaagcactggtgccaactttgatcatggcacaattttggtgacccatatatctgtgcacacaaatgagcggcgatgggtaactgttctgagccgcttcagagaaagtgtcgtcattgtcaatgctgtgggcataagcaccgaattattggcgaaagtgtacgatgggaggagctttggtcatttccttaagtcgagcgctaaagttgagcaactactcccactgttaccaggcaaacctgtattcacacatggtttcattgcaaatcggtttggggctgatgaggggaagagagaagaaaagttgcagggggatccatggctcaaaacaatggttgatttactacagatagaagatctatctgtggtagaggaggcaaaagtagtccttgagagtgagtggtgcaagacccacctacctcagtgtgatctcgaaggggttcgagctcgatgggtacacaaaatcctcgccaaggaatttagggagaaaaggatgggttaccttgtgtcagagcagttcactcatgagcattcaaaacaacttgggaagcacctcacaaatgcagccgaaaggtttgaaacaatataccccagacatcgagcttcggacacagtgacttttatcatggctgtgaggaagagattgcggttttcaaacccagtgaaagaagcggccaaactgaatcaagcgatgccttacggcccatttttgctgagtgagtttttaaagcgtgtgcccctgaaaccgatgcatgatagccggatgatggctgaggccaaatttgatttcgaagagaagaaaacgagcaagagtgctgcaaccatagaaaatcacagcaatcgatctatgaaggaatgggcgatagatattggccttgtattctcgaaaagccaactgtgcaccaaatttgacaacaggttccgtgacgcaaaagctgcgcagactattgtttgttttcagcacgccgttttgtgtaggttcgcgccatacatgcggtatattgagaagaagttaaatgaggttctgccagagaagtactacattcattccggtaaaggtttagacgaactgaatgaatgggttaagaggggtggatttggccgcgtctgcacagaatctgactatgaagcctttgatgcgagccaagaccaattcaccgtcgcatttgaaataagtgtcatgaggtatttgggcttgccacctagcttgatcgaggattacaaattcatcaaaactcacttgggctctaaattaggcagtttcgctattatgcgattttcaggggaagcgagtaccttcctgtttaacacgatggccaacatgctctttactttcctccagtatgatctcagaggggatgagcgcatatgcttcgcgggagatgatatgtgctcgaacaaaaagttgcacgtatccgacaaacatagctctttcctcaaaaagttaaagttaaaggccaaggtcgcgcatacggatagaccaaccttttgtggttggaatctaagccccgatggaatttttaagaaaccacagttagtgcttgaaaggttatgcatagccaaggaaaccaataacctcattaattgcattgataactatgcaattgaggttgctttcgcgtaccaaatgggcgagcgagccaaaaattacatgactgaagaggaggtggaagctttctacaactgcgtgcgcataattgtgaagaacaaacaccttctcaagtcggacgtgcttcaagtgtatcagacggatttggtaatgtag

SEQ ID NO: 687 - DNA, 5727 bp, Pea streak virus
  source 1..5727: mol_type = other DNA
atggcactcacttatcgtagtccattggaggaagtgttgggttccttttcttcttcagagcagagcttgatcgcgatcccagccatagcgaacttaaaaggagtagaacaagaaaaccacagtctattcaattatgcgctgagcccaatagcaaagcaaaaattgattagtaatggtttgtatctcagtcctttctcagctatgcctcactcgcatcctgtttgtaaaaccctggagaattatttactctacaaagtcctacccaattatttagatcacaggttttacttcgtggggataaaagaaagcaaaatcaatttcttgaggagtagagagaagaaattaaacctgtgcgaggtcgtaaataggtacgtgaccagtgctgacaaagctcggtatggttcagaattcactatcaggaggaccctggatagtgataatgagattaaatcaaagtatgggcgactaccaccaaatttggtcgatctcatacctcaattctcaagtaaacaaggtctgcacctattcctacatgatgagctgcattattggactagggcagatttacgtctctttctcacagcgtgcaaccctatcaagatgttggcaactgttgtaataccaccagaattacttattggtgctaccgaatcaatgaacaaatggtgttacacatttaacgttgaggatgatgaattgttcttctttccggatggggtaactactgagggttattcccaaagagcggattgtgctgatctactcacgctatcaaagattatacttgatgatggaactacatactgcgtggatattttgtgctcaaagtttagtcatcatttgattgcaataacccgcggggatgccatagtgccaaaaacccggacattctcaaattttgaagctgtgggcacaaaagggattgcggatttgatggagggtaatgtgcagtgcttgccaatctcctacaccacaatatcgaagattgagaggtacttgatgactctcaacaagccagatgtccaatctgccattgcaaagctaggacagatcgtgcaagagcccagcgctttcgagataaagtttgtcagagagtacgccgcattgcacatcagcaagcgaggattgaatagtctgatattgagggataattgggcaagagtcaaagctgaattcttgaaactcctccctaaagctttttatggaaggtttgacactatcttaaaggtagccttggaggattttgaaagcaatctggcgcccttgtcttttagagttagattagaagagtacggtagtgaatcacttactaatagattagatagttttatttataggactggaggtgtggctgccgtagtgaatggactaattgagctatttggcccaataaataaatctgatcgcaaaagtagcccttactctgacttttattgtgctgaattatttgtagtaaatagcggcactttgcgtaggagtataattgatatgttgaagcggagttattctcacaatgcgctcatggagctgagcccttatagtttcttcaatttgctcatcgagagggctgaaggaaatttggtggccaggtatgttttgagtggtctgcagcctgaagatattgatgcatacataatgcgcgctttgtctgagttgcaagaagaggctgaggagcagattctggatagaaagctactcacacacttggagttgagcgttgaagttaaagctgatccggaaaagagtgatgaggaggaggtggaggaagtcggagaggaaaagccttttgaaagggctgtccaccatatcgattgcgaatgtggcatgaagtttgaatgcgggaaaactatgctggttgatcatgctagagtaaatttcattgatgatttgggcaataggcaagcggtcttcttcagtaagtgccaggttgattataggtataatggtggtgcgcatgaagctgttgagtggcccgagtggttgaatatgctcttggaatgcaatggctttgatccggaagagtatgactgcgtgctagttcaaatttattcaggaggttcaagtatcggttttcattctgatgatgaagcgattttccctaaggacgggaaaattctgaccatgactacaggcggggatgcggacttttcactccgatgcaaagaaggaggctttacatttcgttttgaggcgaacacctacttaatcatgcctgaaggttgccaaatcagtcataaacatgccgtaagggattgtgatcatggtcgtataagctacacctttaggcaattaaaacaatgcagggagtatatggagcgtgagtgtgaagttacttcaagcatcgatccatcagatgatgaccaaagtgtagagatcattaccttgcatgaggttgagatcaagcgtggaagagatgcggataagcaggctttagaagtgattgaagtgcctggtgatggaaactgcttctggcactcattgggttactactttgggctagagggtaggtcgctgaaggagataagtttttcgcggttagaagagatggattgggacttggaacccctcaaaaaacaaatgagtggttatgagttctgcgagttggaaagtattgttgctgcagcaagattgcacagtgtggagatagaaataattgatcacaatagttctatggtttgggtgttcaccccaaaaaataacttaaggcagtatgctaggatgcaacttgttggagaacattatagccccgtgattccaaaagaggtttgtgtgctaagagctatagcagattctttgggaaagtctcttcaagacatccatagatgtctcaccaaagctgagaatcgccacctccttgaactcgttgaatcaggtgaaggtttggaagtgtttttgattgagcctttcatggtcttatttgggatcagagcagtgatcgataatgatggggacctaattgttcttaacgcaaaaggcgctcttgagagattcttccaaaattacggagatcacctcacccacgtgagtaaggataaaattgtgggtttggagcggtttggtgagtttgagggccagggtgttgaaaggaactccctcgcggcgctcaagtctgcaggcacggaactgatttatgaagctaagaaggatagggcagacatcctttgtgagagtttgcactccggattaactggagtaatctcttcaaaattgtacaatgatcaaccattgatccaaaatcccgggccgaactctatttgtaggagtttaactgtcattttggggactttcggtgcgggtaagagcactctattcattaaattccttaaggcgaatgaaggcaaaagagtacattttgtttcaccaagaaaagttctcgcagaggaaatcagatccaatatggcacgagctcttgggtatgagagtggacgaatgggtaagagtgggaaattaaagagcaaaaattggtttgtgcacacttttgaagttttcctacttaaaattcggagcctaaaagctgaggattgtgtagtcatggatgaagtgcagcttttcccacccggttatttggattgtatgacttaccaactgaatggtaagtgcgagttgatcgctttaggtgatcctgcgcagagtgattatgataatgagaaagacaggaatatcctttgctgtttaggttcggacatagagcgggcactggtaggtaatgagtatgattacacgattggttcatacagattccaaaacaggaattttttgaacagattaccttgctcttttatgcatcagagcttggaaatcgatgagccttacttgatttttgagggtgtgggcgagttcctcaaggtcttcaccgagtaccggtcagtggtgctagtggctggtttcactgaaaagaagcttgtgagggcttattatggtcaggaatgcagagttctgacttttggagagtcaacaggtctaactttcgatcggggtttgatcattataagtgctgattctttaaaggtcaatgagaaaaggtgggtcacagctttatcaagattcagacagaatttagcccttttgaacttaactggagatactctggagaaccttgtactccggaaagccaattcaatgttagctaactttctgaaaggctcaagcaaagtcgagaacctcaaggaaattttgcctggtgtaccgaagttcaaacaaacttttattggaaaggtaggtaaagatcaaggcttggttgaagaaaaattacagggtgatccttggttgaaaggtgaattatttcttggccagactgaagatgcagaggtgatccaaataaatgaattcatggagcaggatcagtggtttaaaacccatttgcctcgctgtgagatggaaggggtaagaagcaggtggctgcatttgctgcttgagaaagaagcaagagaataccgtttcagagatatggtgaccgagcaattcaccgatgaccatgatagaggttgtggtgagaaattgaccaatgcggcggagcgttttgaggcgatctacccgaggcacagagcttctgataatttaaccttcttaatggccgtcaagaaaagattgagattctctaagccccatattgaggaagccaaactgaatgaggccttgccgtacggcaaatttctattggatgagttcttgcagaagatacctctgcgagcaactcatagacctgaccttatggctgaagctgtgcaggattttgaggagaagaagagaagtaaaagtgctgcaactatagagaatcattcaggcaggtcctgtagggattggttggctgacgttggtttagtgttttcaaaaagtcagatttgtacaaaatttgataacagatttagatgtgccaaggctgcccagtcgatcgtttgtttccaacattctgtgttatgccgatttgcgccctatatgagatacattgaaaaattgctaggggaggcacttaaaaaaaccaattactatatccattctgggaagagattggaagatctggatgattgggtcgtcaagggtaatttttcaggaatttgcactgaatctgactatgaagcctttgatgcttcccaggatcattggatcatggcctttgaattaacactgatggaacatttggggctcccaaaagatttgattgcggattatagatacattaagacgcatttgggctccaaattgggagcctttgcaatcatgcggttctcgggggaagctagtactttcctttttaacaccatggccaacgcgcttttcactttcttgagatacgacactaggggtgatgaattcatatgctttgctggtgatgatatgtgtgcctcaaaacatttgaaggtcagcaacaaatttgaggatttcttgtcaaaacttaagttgaaggctaaggttcaatttaccaaaaacccgacattctgtgggtggtcattattacctttcggaattttcaagaagccccaattggtctatgaacgcatctgcattgctagagaaaagaagaaccttcacaattgcatagataattacgcaattgaattgtcgtatgcttataaaagaggggagttagcagtcaatgctatgaatgaagaagagactgatgctttttacaattgtgtcagggtcataatcaaaaggagccacttgctgaaaagtgatgtcaaggatatctttctcaatgcgaaatccctcatggaaagtctgaattaa

SEQ ID NO: 688 - DNA, 538 bp, Sedum latent virus; identical to SEQ ID NO: 562
  source 1..538: mol_type = other DNA

SEQ ID NO: 689 - DNA, 5775 bp, Shallot latent virus
  source 1..5775: mol_type = other DNA
atggccctaacttacaggagtccagttgaggaagtgcttacaagcttcacaacaagtgagcagagtgaaattgcgcgcggagcagtccagggtttgctaaagttagaggaatttaaccacaatctattcaatttcgcattgagtcccatcgcgaaacaaaggttgtgcggtagcggaatctacttaagccccttctcttacgtgccccactctcatcccgcttgcaaaacgcttgaaaattacaatctttatcaagtcgtatgtccattaatagatcataggttttacttagttggtatcaagcaatctaaattgtgttttttgaaaggtaggaataggaaaatggatatggttgaatgtatcaatcgtatggtgaccagtcgtgacaagttgcgctacggtaatgattttgtggtccaagctggtcaacccgggactgttaagaagaatagtagaaccgtaaccttttatcctgagttagctagtcttgttccacacgagatcaaatttagatccagagcattattcttgcacgatgaattgcactattggagcaaagaaagtttagcaattttcctggatcaatgctcacctgagttaatgctagcgactgtcgtgattccaccggaattgttgctcaaagctaaggagagcatgaataaatggtgctatgagttcgaagttaaaggtcctgatctctatttctacccagatggggtaagagctgaaggctatatacagcctgccggttgcgtttaccttttgaccacaaacaagatgatcaccccgggagggcaggtttattgtttcgacataataagctctaaatttgcgcaccacgttatagctatcacccgcggtgaagccctggtaaagaaagagaattcattttccaatttcgaagctatcggttcctcttttgccagtaaattgctacatgatgaatatccatgcttcccaattagttacgaagtagttatgaaattgtatacttatctctcttccttaaactcacctgatgtgaaatcagccgtggctaagttgcgccagttggtcgaacacccgactgcctttgaagtccaattcactatcgaatttgccaacttgtacattcgctgcggtgtaaatctagatattttcacgccaagcaccaaaacactattactgaaaagcttggctgtgcttatgcccgcgctgctgaccaaatattctaaaaaattaatgagggtcagcttcaccagttttgtgagccatctgaagccattgagcttcaacgtgaaatgtgaaacaatcgaccttaaaacgcatgcaaaaccttgctatgacaggcttattccgcctggaattgactcgctaatgaattgcctggaatttgggaaaatcacttctgggaaagagaacttctctagggagccagccccttacagtttttcattaaatgaaacgtgccacttacattgtgctcccgaagaattgcttatagcgaatatgaaattccttggcgatctagaaagcttcaccttctctagcacagatcaggtacttgccggggctgccactgtgtttagaccgttgtatcaattcctctttagcattctgggggaatactgtgtggactactgtctgatgcaggccgcccgtaaacagcgcatcgagaaaaatgagcgcacagcggcgaaggttctcgcactcccatggttctccaacgagtcttatggggatgtgacggtgtaccctgcacctgtgtttaattgcttagagcatgaagaagaaaactggggtgctgctgacacggtcgacgatattgagcccatgttgctaaatcttttcaattgtgtttgtggggcgggtatacagtggactgtggcatttcacgtagaattgcttgatgtcagtattgatgatcgtttgctcaatcgcagagctgccttttatagtaaggggtgctttggttacagttataacggtggaaatcacgttggtcatgaatggttagataatttcgactcttttctggcgatcaacggtcatgatcttaattatttcaattgtgtgcttttccagcagtatgatgggggtcacggcattggattccacagcgatgatgaggaactctttgagaaaaatagtaaaattcttaccatttgcattcaaggagattgtgaatttcgatttcgctgtgccacaggtgaaacaggtttcttcatggaggctccaaaacaatttatgatgcctgaagggttccaggagagccacaaacatgcagtgcggggttgttctcctggtcggattagtgcaactttccgtagggcaaaggttccacctgttgatgattttttaacctctgaaaatggaaaagtagattctgagaacggtgtggatgatggtggcgagtcagagtgtctgagcttcatagataatttgggcgtttcccacactgttcagaaaaatgtcaacatcgcaccttttgttgttagggaagtgagtggggagaataacatgtgcttctggaattgcctctctttcttacttaacctggatgcgctcccacttaaaaacaatctatccaaaggtttggaaaaactcaggggaacaactatacatgctactctggctgaacaattggcccctggagcaatggcagaagatgacgttatttctctttgttgtcaaattttttcattggagattgtcgtgcatagcttgagtctagggtgcaccactaactttgcgaccgaagatgcagagaagaggattgatatcctgcatgataatgagcatttctcactgcttttttataagaacgattgttttgtatctgcagtggcgcaaaccttttcgcgtgataccaatgaaatgtacagagtgctggcggacaaaaaatttgatgaactcactgaattgttgcgcttaggatgcggtttgaccattgaggatttggaagtaggttttaaactgttgaacattaaagcccacattatgaaagatggggagtacttgcagattaatgattcgggggagatcaatggtttctattctttaactgatgaacatcttgtggcttgcccacctttcagcaaaagcttattcgctaccaaaaccatcctgaattctaatgagcatttagctgtgactgccatcaagatgctgcgtgaagtgggttctgaattgatttatcccgcttcccttgatagagcttccaattttgagaggagtcttctcaagggttgtactggcattcggtcatccactctctttgcagggctttctagcagactcaaggaagggcacaatgatcatgaacgttcactgacaactgtcttgggaactttcggttctggcaagacaagcttgattaaaagggctgtcgtgaattttaagaagagcggtcgcgtggtgcattttgtgtcaccacggcgttcactcgctgatgctctcattcagtcattgggacttactgaccggtcgggcacttgcattgacggcaagggagggagtaagcggaaaggcaagaagagctcacaaaacactttcgtgagaacctttgagacctttttgatccaaaattcgcgcgtcgggggtaatgatctggttttctttgatgagattcagctcttcccacctggctaccttgactacacccccatgttgctccctgcaactgtgcagtttttcatactcggggatccactccacagtgattatgacagtatgaacgataggcacgtcttcctcggttatgaatcggacatttgtaatctactaaaagggagagaatacaagtacaatatattgagtcgccgtttctccaataagatgtttgcttcccgcttaccctgttctttcaaatctgaatgtttcaccactgatgagccctacgtcatgttacagggctttggggccaatttggatgaaattaaaaatttctctgaggtttatctagtggccagtttcgtggagaaaaattttgtgaaggctcatttgggcgagaatgttaaggttctaactttcggtgagagcactggtttgacattcgagagggggtctgtattcattaccgaaagcgcatttaagacttctgaatgcaggtgggtgaccgctttgagtcgtttctctagaaatttaatcttgatcaacatgctcgagactacctttgaatctttggcgagccaaaggtccaccacagtcttggggcgtttcctgagaggtaccgcggatccctcccatactctggaaaatttacctggtaagccaattgcgcaatatgggttcacacactgtgttggcaggaacttaggggtccgtgaggctaagctgcagggggatccttggctcaagagtgagatcttccttggacaagaggatgacatgcaggaaattgaagaagttgctgagttagtacaaaaggagattttcaaaactcatttgccacgatgcgatttggagggtttacgcgcgcaatggaatgataagatactgtccaaagaggcgcgggagttcaaatttcgcaatctagttacagagcaattcaccgattgccattctaagcagaaaggtaaaatcttaactaaccaggcagaacgttttgaaacgatttaccccaggcatcgtgccagtgatactctcacgttcctaatggccgttaagaagagattaagattctcaaaaccgcacttggaatgcgctaagctaaaagaggcagaaccatacggtaaatttttgctcgatgaatttttgaagagaatccccttgaaaccacaccacaggcatgatctaatgtctgaagctctccatgattttgaggaaaaaaaagtgagcaaatcagccgccatcattgagaatcacgctaatcgatcctgttccgactggttggctgacgttggtctggtgttctccaaaagccagatttgcactaaatgggacaatcgctttcgatcggcaaaagccgcccaaacaatcgtctgctttcaacattcagtgttaataagattcgcgccttacatgcgttacattgagaagaaggtacttgaggttttaccaaaaaagtactatattcactctggtaagggccttgaagagctgaatcagtgggtgtgcgacaataagttccatgggatctgcactgagtctgactgtgaagcttttgatgcctcccaagatcaatacatcatggccttcgaaatcgcactaatggaatatcttggtctacccagatctctaataaatgattacaaatatattaaaacgcatctgggctgtaagatgggcgcgctggcaatcatgaggttctctggcgaagcaagcacctttttattcaacaccctggctaacatgcttttcacgtttttgaggtatgatctcaatgggcaggaaagcatttgttttgctggggatgacatgtgtgccaatcgtcgattacgtgtcaatctcaagcatgaggacttcctaggcaaacttaaattgaaggcgaaagtggctttcaccaaaagaccaaccttctgtggttggaatttaacccactttggtatttacaaaaaaccgcaattggtttttgagcggatgtgcatcgcaaaagaaactaataatctgcacaattgcattgataattacgccattgaaataagtttcgcctatgtgaaaggtgaacttgctgtctgccacatggacaaagaagaactcgacgccttttacaattgtgtgcgtgtggtagttaagagcaagcaccttctgaagtctaacgtgcgagaactttttaagaatgaagttgaaacttga

SEQ ID NO: 690 - DNA, 5775 bp, Shallot latent virus
  source 1..5775: mol_type = other DNA
atggccctaacctacaggagtccagttgaggaagtgcttacaagcttcactacaagtgagcagagtgaaattgcgcgcggagcagtccagggtttgctaaagttagaggagttcaaccacaacctattcaatttcgcattaagtcctatcgcgaaacaaaggttgtgcagtagcggaatctacttaagccccttctcttacgtgcctcactcccatcccgcttgtaaaacgcttgaaaattacaatctttatcaggtagtatgtcccctagtggatcataggttttacttagtaggtattaaacagtctaaattatgttttttaaaaagtaggaataggaaaatggatatggttgaatgcatcaatcgcatggttactagccgtgataagttgcgctatgggaatgattttgtggtccaagctggtcaatcggggaccgtcaagaagaatagtcgcactgtaaccttctatcctgagttagctagtctagtcccacacgagatcaaatttaggtctagagcactcttcttgcacgacgaactgcactattggagtaaggaaagcttggcaatatttctggatcaaagctcgcccgagttattacttgccaccgtggtgattccacccgaactgctactcaaagctaaggagagtatgaataaatggtgctatgagttcgaggtcaaaggccctgatctctacttctacccagacggggtaagagcggagggttacatacagcccgccggctgcgtttatcttttgaccacaaacaagatgatcaccccaggagggcaggtttattgctttgatatcataagttctaagtttgcgcatcacgtgatagcgataacccgcggtgaggctctagttaaaaaggaaaattctttttctaattttgaggctatcggctcctctttcgcaagcaaactgctacacgatgattatccatgcttcccaatcagctacgaagtggtcatgaaattgtacacctatctctcttccttaaattcacctgatgtgaagtccgccgtcgctaaattacgccagctagttgaacacccaaccgcttttgaagttcaatttactatcgaatttgccaatttgtacattcgctgcggcgttaatctggatattttcacacccagcaccaaaactcttttgctgaaaagtttagccgtgctgatgcctgctttgctaactaaatattcgaagaaactgatgagggtcagtttcactagctttgtgagccatttgaaaccgttgagctttaacgtgaagtgcgaaacgattgaccttaaaattcaagcgaaaccttgctacgaccgaattatcccccctgtaattgacacactcttgaatcgcctggaattagggaaaacattctttgggaacgaaacattttctaggacacctgctccttacaattttgtgttgaatgaaacatgccatttacatggtgctcctgaagagttgctcatggcgaacatgaaatttcttggtgatttggagagtttcaccttttccagtaccgatcaggtactagctggggctgccacagtgttccgacctttgtaccagttccttttcagcactctgggggattattgtgtagattactgcttgatgcaagcagttcgcaaacagcgcgtcgagaagaatgagaccacagcttcaaaggtacttgcactcccatggtttacgaacgagtcttatggagaagagaggatgtacccggcgccagtgtttaactgtctagaacatgaagacgaaaattggggcgcagcagaagagtttgatgatgtggagcccatgttattaaatcttttcgattgcgtctgtgggacaggaatacagtggactgtagcatttcacgttgaattgctcaatgttagtatgaatgatcgtttgagcaatcgcagtgccgctttttatagcaaagggagtttcggttacacttacaacggtggacagcacattggccatgaatggttggatgaattcgattcatttttggcgattaatggtcatgatcttaattatttcaattgtgtgcttttccagaggtatgatggtggcaatggaatagggttccacagcgataatgaagaacttttcgaaaagaacagtagaatactcactgtttgcattcaaggcgattgtgaatttcgttttcgttgtgccacaggtgagacaggtttttatatggaagctcccaaacaattcatgatgcctgaaggtttccaggaaagtcacaaacatgcagtgagaggttgttctcccggtagaatcagtgcgactttccgtagggcaaaaatttcacccgttgacaaatgtgtgactccagagaatgaaaaattggactcggaatgcagtgcagatgacggtagcgagtcagaatgttttagctttatagataatttgggtgtttcacatactgttcagaagagtgtcaacatctcccctttcgtcgttcgaaaagttagcggggagaacaacatgtgcttttggaactgcctttctttcttactgaatctggatgcttccttgcttaaaaatactttgtccaaaggtttagaaaaactcagaggggtagctatgcatgcgactctggcagaacagttggccccaggtgcaatggcagaagatgatgttatatctctcagttgtcaaattttttcactggaaatcgtggtacacagtttgagtttgggatgcaccactaccttcgccaccgaagatgcggaaaagaggattgatattttgcacgataatgaacatttctcattgctcttttacaagaatgattgtttcgtatctgccgtggcgcagactttttcacgtgacaccaatgagatgtacagagttttagcacataaaaaatttgaagagcttacagaattattgcgtctggggtgcggtttaactcttgaggatttagaggtgggttttaaactgttgaatattaaagcccacattaagaaagatggggaatacttacaaatcaatgattccggggaaattaacggcttctattctttaacggatgagcatcttgtgtcctgcccaccctttagtaaaaacttatttgccacaaaaaccatcctcaattctaatgaacatttggctgtgactgctatcaaaatgctgcaggaagtgggttctgagttgatttataacgcttctcttgatcgggcttctaattttgaaaggagtcttctcaagggttgtaccggcattaggtcatccactctcttcgcgggactttctagcagactcaaggaagggcatgaggatcatgaacgtccgctgacgacagtcctgggaacttttggagctggaaaaactagcttaattaaaagggctgtcgtgaattttaagaagagtggtcgcgtagtgcattttgtgtcaccacgtcgctcgctggctgatactctgattcagtctttgggacttacggaaaaacagagtgccggtgcggacggtaaaaatgggggtaagcggaaaggcaagaaaaactcacagaacacctttgttagaacttttgagacctttttgatccagaatgcgcgcgtcggtggtaatgatctggttttctttgatgagattcagcttttcccacctggctatcttgattacgcctccatgttgcttcctgacactgtgcagtttttcatactcggggatccgcttcaaagtgattatgatagtatgaacgacaggcacgttttcctcggctatgaatcggacatctacaatctactgaaagggaaagaatacaagtacaatattttaagccgtcgattctccaataagatgtttgcttctcgcctaccttgttctttcaaatctgagtgtttcactacagaagaaccttacatcatgttgcagggctttgggaccaatttggacgatatcaaaaatttttctgaggtttaccttgttgcgagtttcgtgggaaaaaatttcgtgaaggcccatttgggagagaatgtgaaggttctaacctttggtgagagcaccggtttgacgttcgagagggggtctgtattcattactgaaagtgctttgaaaacttctgaatgcaggtgggtgacagctttgagtcggttctcaagaaatttgatcctgattaatatgctcgatatcacctttgagtccttagcgaaccaaagatccaccacagtcttaggacgttttctgaaaggtaccgcggatccttctcacactcttgaaaatttgcctggtaagccaattgcgcaatatgggtttacgcactgtgtgggcaggaacttgggtgtccgtgaagcaaaactacaaggggatccttggcttaaaagtgagatctttcttggacaagaggatgagatgcaagaaattgaagaagtcgctgaagtagtacaaaaagagatattcaaaactcatttgccccgatgcgatttagaggggttgcgcgcacaatggaatgataaaatcctgtccaaagaagttcgtgagttcaagtttcgcagcctcgttactgaccaattcaccgattgccactctaagcagaaaggtaagatcctgaccaatcaggcagaacgctttgaaaccatttaccctaggcaccgcgctagtgatacgcttacttttctcatggctgttaagaagagattgagattttcaaaaccacacttggaatgtgctaagctgaaagaagctgaaccttacggtaaatttctgctagatgagtttttgaagagaattcccttaaaaccacaccacaggcatgatttgatgtctgaggctcttcatgagtttgaagagaaaaaagtgagtaagtcggctgccatcattgagaatcacgccaatcgctcttgttccgactggctggctgacgttggtctagtgttctccaaaagccagatttgtactaaatgggacaatcgttttcgatcagcaaaagccgcccaaacaatcgtttgcttccaacattcggtattgataagatttgcgccctatatgcgttatattgagaaaaaagtgctagaggttctgccgaaaaaatactacatccattctggcaaaggccttgacgagctgaatcagtgggtgtgcgataataagttccatggaatttgcactgagtccgactacgaagcttttgatgcttctcaagatcagtacattatggcttttgaaatcgcactgatggaataccttggtctgcccagatctctaataaacgactacaaatacatcaagactcatctgggttgtaagatgggtgcactggcaatcatgaggttttccggcgaagcgagcacttttctgttcaatactctggcaaacatgcttttcacatttttgcgttatgatctcaatggacatgagagcatttgcttcgctggggatgacatgtgcgccaattatcggttacgtatcaacctcaaacatgaggacttcctaggcaaactcaagctgaaagcaaaagtggctttcaccaagagaccaacattttgcggttggaatttaactcactttggtatctacaaaaaaccgcaattggtctttgagagaatgtgcatagctaaagagactaacaacctgcacaattgcatagataactatgccatcgaaataagcttcgcctatgtaaaaggtgagcttgctgtttgccacatggacaaggaagagcttgatgccttttacaattgtgtgcgtgtggtggtaaagagcaagcaccttctgaagtccaacgtgcgagaactatttcagaacgaagtcgaaacttga

SEQ ID NO: 691 - DNA, 5883 bp, Yam latent virus
  source 1..5883: mol_type = other DNA
atggctctcacatacagaacacccatggaggatattgtaattgcttttgaaccacaaacacaggctttgattgcaagtagtgcagcacaaatatataaaaaaatggaggaaggtaattgcagcttctttaatttccacttgccagcaatagctaaaaggaaattgagccaagcaggcatttatttgagtccattctctgccgtagtgcattcacaccctgtatgcaagactctagagaatcacctactctacacggtcttgcccaattatgtaaatagtaagttcttttttgtaggaatcaaagagcggaaattgcagctcctcaagtctaggtcgggggcactggagagtgtgcagtgtattaatcgcttcgtaacgagtgcagataaattaaggtacacaaatgatttcgtttgttaccaaagtcgcgcctcggacgaattgttcaagcacaacccaggcttggcagagcctgccttgcgtagcttggttgagcccttgagaaggcataaggcgaggtaccttttcttccatgatgagttacattactggaacagtaaaacacttgcaagtttcttgcaggtcatggaacctgaagtggtgctcgcaacgattgtttaccccccagaattgctatttaagcaaaaaaagagtttaaatgaatggtgctacacttttgaaattttaggcgatagcctaatgttctatccagatggggtaaggagtgaaggataccagcaaccgctcattggtgggtacctgttagagtgtaataaaatagtattacgtgatggtaccacgtatatggtggatattttgtgtagcaagtatgcgcaccacttggttgcaatcactcgtggtgaggccgagagtgtaaagaatcgatcctttgggccctttgaagccacagcttcaaaaacactcgcaagactgtgtcccgagtaccctatttgcttgcctatatcctgcgaagttgtgaataaggtttatcggtacttgaggaccttgaagaaaccagatgtccaatcagctatggcaaaattaagtcaaattgtggcagaaccaacagggcaagagatagattttatagaagatttctcaaagttggtaattcaaaatgagagctttaatttgagcatcgctccagaacgcctcaaagtgtttgtgggtacgtggttggggtggctcccgggtgtgctgtcagacaagatgccctcagtgcaagctctgagtctgggtgattttatcaaagggctcgaacctttcaactttacagttaagctccgcacattgaggtgggacacactgtacgctgatgtgctcaactggtcgctggaaggtgagggagatccagagttggtggtgcggcaacttgataggaagtgggtgaatgcaccttacgaggcgatgccccaaagggttagtgcgccctactttggaatggtggagctcatagacgcaccttggaagcctctgctggaaggtctagaagagttattgctcccctttgtgaggcgtgcttttttaaattcacagtgcaatcaattcacaaggaccatttcaagagcagctgtgagtacatatgtgctccgtttgactgagagatgcagcattttgcgtcgtaaggtccgggtaggaagagagagtagagcatgtaccccggcagaactgctaggacttggcgatatggcgcaactcacaaggcagctagtggtgcgtttgcaacagcgtgccaggttcactttttgggaattggggatctcatggtttgtaaggtttgacacactcaatgtgcggtatttgagtgacgtacctatgtatgcaaaggcgcacaaggatacaatgcggatgatgggggaggttgttaaggacatactcaaaaagggaccgcgatggaaaattgatgcgcctaagagatatgcgtgcaggggagaggtcaaagttgtggatgctccaagtgatgcagcagggaaggaggagaaaggagaggacttcaagtgcctatgtggtttggttatgccagtaactaaactggaatatcctgaactttccctaggggcgcctgattcccttagggggcgcaaggcaggctggtattgcaaaactggacaggtgtaccgatacaatggtgacgttcacgacgcacagggttggccggaggagttgatgttatggtgcgaggcgaatagtatacccccgatgtatgactgttgcctgtatcaaatttacgatgaagaggctagcatcggttactacgcagatgatgaggaattatttgaggttggtagctcagtgctgactgtgaatcttcatggtacagctcagttctccatcaagtgtgcaaagggctctatatcgaggcaccttgcgggacccacaatgttcaccatgccacaggactttcagttgagtcacaaacatagtgtgcatggatgtagtagtggtaggatctcactgactttccgttgtttgcgcaaggatcttgcaacaggaggagttagtgatcgcatgattgagaagttggaggttgaagaaagtgcacaacaagtggtagaattaggcggagtgggtatcacacttcgagagagagatcccactagcaagtatgttgtgcgtcaagtccccggtgatggatcatgtttttggcatgctttgggggagctattggacgcatcgccaaatgagttaaagcgagcttgtaccaaatatgaatttgcagatcccgcactcaatgtggagctacatgagtgtgccaaagatggtgcgtatgttacagatgcaggtatcatagctgcttgtctgtgcttacaggccagaatagtggtatggaaggaggaagttggccaaatacaggagtttgtgccccaaagctccacatgtgtgctgaatttgcgtttgattggtgagcattttgagccaatctacatcaaaaatggttgcgttatctctagcattggacttgcaatgggcaggaaggagtgtgaggtcctagaggttttgcaacggaggtgcgacgatcaaatccttaaggaggtgtgggctggagaggggttgtccccctctaccatggaattggtatttaagtgctttgacgtcgctgcacatgttgaagagaaaggtcaggtatctttatacaatccagaggggagtgctcaagtgagtttcacattggaagatggtcacttaagctttaacccaaggaagaaagatcccagcacaatgatgcgaagtggtacaacgtgccagaaactgtttccgagcgctacgcttaatgtgttgaaacagaatgcgacgatgattacctatagacctgacgcgacacgtgcgggattgctcgcagatagtttgcacgatgcctgcaccggggtccttggttccgcgctattcaataataaatgcaacttgcgcacacagttttgtagcgtcgacggtgagctggtaattcacatgatagtcggcacctttggatcagggaagagtactatctttcgtgagctcatgaagcgcgcccatggaaaaatttttgactatgtgtcccccaggagggcgttggctgaagattttaagaagctaattggtatgagctgtggtcaagccggaggtaagaggaaggttgggcaggaaaactggactgttagcacttttgagaagttcttggaaagagtgccattcctcgtcgaggggcaggtacttgtgattgatgaattacaattatacccaccaggctacatagatcttgtacttatgtgtaagaaggtggacgtggagttattcctggttggtgatccaatccaaagtgattatgacagtgagaaggatcgggtggctctggccccgctggaggaaaattgtgaggtgctcttgcgtggaacaacgtacaagtataacatcacaagcaagaggtttaggaattccaattttataggccggttgccatgcactattttggcggatgaatgcactattgatgaaccttacgaattaaggttgtacattgaaaatcttaaggaaattgaagagaaataccaaaaagtggtattggttagtgcattcgatgaaaaaatggctgtgcaagcttacctcccgaaggctagggttctgacttttggggaaagtacagggttaacttttccctatggcacaatacttatcactgcaatctctgagcgtgttaacgatagaaggtggatcacggctttgagtcgcttcagcctgaatctctgttttgtgaactgcagcggtatgagttacgagcagcttgctatgaagtatcgtgggagggctctgggtaaattcttatgcaagggggccactaaggaagacctcctaggggagttaccgggtgaaccacaattcatcagttccttcgaatgtaaaatcgggagagatgagggcgttagggaggaaaaggttgctggtgatccatggttgaagaccatggttcaattgatgcagagccctgacgtgcaggaggaagagatagttgaggcagtggtctccgatgaatggttcaggactcacttgcctagagatgaactggagagtgtgagggcaagttgggtgcacaaaattctggcgaaggaaagcagggaagtaaggataggtgatatggtctctaaccaattcactgatgatcattctaaccaagtagggggccgtcaactaaccaatgctgcggagcgttttgagacgatatacccgaggcatagggccaatgatacagtcacgttcatcatggctgtcaagaaaaggctgagtttctcgaatccagctagggaacgagggaagttgtcccgcgcgttaccttttggcaaagctttgttaaacaaatttctgcagcacgttcccttacgacctgcacataaccataggatgatggaagaggccttgtgggaatttgaagagaagaagctgagtaagagtgcagcgaccattgagaatcatagtggacggtcatgtagggattggcctatagatatggccatgcttttctccaaaagtcagttgtgcacaaaatttgagaatcgatttagagtggcaaaggcagcacaaagcattgtgtgctttcagcatgccgtgctgtgtcgctttgctccgtacatgaggtacattgaaaagaaagtgcatgaagtcctcccctctaggttttacatacattcaggtaaggggcttgatgagcttaatgattgggtcatccgtggaaagttcgatggcctctgcacagagtctgattatgaggcctttgatgcctcccaagatgaatttataatggcctttgaactggaattgatgaaatttttgggtgtgccccacggagtcatagaggactacaaattcattaagaccagcttggggtcaaagttgggcaactttgcaatcatgagattctctggtgaagctagcactttcctcttcaacactttggccaacatgctattcacttttatgcgttacgacataaaggggaatgaatttatttgttttgctggggatgacatgtgtgcttcaaaggccttatctgtggtaaacacccacaagagcttccttgataagctgaagttaaaagccaaagttcaggttacgagcaaaccaactttttgtgggtggcatctgtgtccagatgggatttacaagaaaccccaactcgttctcgagaggatgtgcatcgctatggaattgaataatctggccaactgcattgataattactccatagaggtgggatttgcttacaaacttggtgaacgggcagtgaatagaatggatgaagaagaggtaagtgcattctataactgcgttcgcatcatagtacggaataaacatctcttaaaatcggaggtccgttctgtgttcgaagaatcaaaggagcttcttaccatgtga

SEQ ID NO: 692 - DNA, 6009 bp, Actinidia seed borne latent virus
  source 1..6009: mol_type = other DNA
atggcttcaattgcagtacgaactccatatgagtctttttttgccgcaaacagtaaagatgaccagagacttcttcttaactccggtcttgaattcgttaaacgagagctagatgccgttggtgtgcactttgcgtatcaactttcctctcaaaagaaggaagcactcacgagcatgggtgtatcactgcaccctgttccctttttgtcacattcccaccctttttgcaagactgttgagaatcacatgcttctcaatgttctgccagacttgatgggtaacggcaagtggatcttttcttctatcaaaaaaaggaaaattgatacaatcaccaagaagcgtggtgtacaggcatctaatgtagattttgttaataaagttatatgtgctaaagatttcactaggtatgattttgatcccaaggtgcatgatgttagaaccaacatgtcatctagggaatttatctttccaaatagttatattagggcttgccataataataaaatttttatacatgatgaaattcaccattggtcagccgatgacatgatttacttcctcaacaattcaaatcccaagatgttgatatgctcagtggtttatccacctgaactcttaagagggattaagcagccacagaatccatcactatactcattcgaggttgacgagaaaaagcaaaaattgttcttctttcctgacaactgtaaaagtgaggcatatgaacagccactcagacttgattggctgttcgaagcagcctatatcgacaccggtgttaagaggtacactgtgaaactcatcaagagtgcttattcacatcacatgttccaaattacacctggtgagtatgttacggaaagcagaaggttttttaacgattttgacaccattgacttgtcaatcatgcatgagaatagatttaggtattatgattacatacctatcaaaaagacacatcttcaaaaagtttactcatacttattgtgtctcaagaagccggatgttgaatctgggttggcaaagttgaggcagatgtttgatgatgatcaagactgccgagtggttgaatttttttcaaaattttgtaaagacataatagaaaaacacaaaaataagtgggaattgtatgggtttagctggttggaaacggcgaaagattcattcatcaaaagcttacccattcagatagctagatgctttaaaaggtgggaattcaaaaatatatttgatttcctatttaatttacaaacgctatctgtgtcagtaaacactagggtcgtaacaagaacttttgtgagttcctttactgactacatatgtgaagaggttaaggagaatcagagtgtggacgcactgatgaactctaaatggcatggcattggacctgaaaaaactcaaaaatggaacatcagagtgatgaagatgcatgcttttgaagagttcagaaatgggtcagtcaagagaatcagtgtcctactatttctgggttttgaagcagaaagaatgagaaaggaactgaatttaaaaaaaaagaagaaaggagaggcacacactctgaaattacttaagtacacaagagacggtcccttcatcccacccaaatggctatttgagggtgaagatgaaaaagagaaaaaaaagaataaagacaaggaagatattgggatcgaagaaaaggaattcataaaagtaaatctcgtgacgtcaggctggtacgtcaaggttgatttgctgacaatgataagggaagaggaggaagtaggaaagaaggtggagaacaatgaaatttcaatcctcaagagcaaaaaggaggaagaaaaagaaaagagcattgttcactggccaactgatgcaaaatcaacggaaaaagagggaaagaagagggaagagattgaagtgggaagccctcatgaggaggttgaaaaaggaaaaaagaaaattgtgcaagagtgtccaaatgagattgcacccagatctgataacgaagatcttagagtcttcatcaccagagaggatctgaagaatgggtgtgagatcaccataatggaccatgatgctcatccaatgaaaaagaggcgaattgccaaagtggtaggagatggcaattgtttttacagagcattgagattatgccttggacatggtgagcatgagtacaatgttacaagagagaaactgcacaaaagtgcattgagttcaacctttttcagactcgaagatgatattttgcatgagttgatcactgatggtgtgtacacctctgatgagttggtgaaatttattgtcaacctagccaatatagagttaagaatatcgacacagaatcaactcaatcacttctcctcgtataaaccgctaattgccaaatatgaaaatgagccagtgtgcgtagtgcatatgcacctagagaatgagcactttgatgctgtgctttatgctcatgatgaagatggctatgatcaagaggaagaaggtggggtgattgaactcaaaagaggaaactttgaggatcttgaaaagcttaactttcaaaattacaagcccacaaagttaaaagggagaaaagctttcttctttgtcaacaatttggatatcgattatgggcacgataaagtgaggtacaaatcaaatctttatgatatagagagtatatgccccaaagatttgtacaatgggtacaatgcttgccttgtgcagatattcgaagaaggaggtaacattccaatgcatagagatgatgagatttgttatgatgatgaatctatattgtcaatcaatttgaaagggagtgcgactttctcatattcagatggaaatgttacaaaggacatcagaatgatggagtctagctacattgttatggatggtccgtttcaaaagaaattcaagcactctgtcaaaaattgcagcagtggaagaattaatgtaacattcagaaggcacataaggagaatgaacatggagccattggttgacattaacaaggagataaaggcaatgaaaaataggtgtatgattgatgcaatagcggataatgaggggagatcaattcctgttgtgatgaatgcattgcttaagaaagaccgcatcttctgggatgagtggaggaaaaatgataatggagggacaatatcagacttgatcaaggcagcgaatgaccttgccttctcatttgaagttgacaccatggacggtgtcaaaactttgaacaataaaggccccctgttcacctttgaactcaaagatggtcatttccgaaaatcaaagattgaaaagataggaaaagttatgactgagctggaaagaagggagatgaaaagggagacagagggttcttttggagacaaggttgtggagcttgtatcaaactccccaggatttaacaaattgacttttgaagtcgatgtggagtatgtgatgaaaatagttcattctttcaagaataggatgacaggaatagcactaagtgacatatactcaaatggggaatcaatctttggggaggttattgaagaaataagtaggatcaataaatcctcatgctcagacaaaaagaagaaagatgggtcttatgaaagtgagcacatgacaaggaaaatcgaattgaattgtgtcattgggcttggtggatctggtaaatccaactcactacagagctttctcaaaaaaaatgttaaagggaagtttcttgtgatctcacctagattaaatttggcaagtgattggatctcaaaagttggttgcaacccaaacaaggtcagaacattcgaaactgcactcaggacaaacctcaaatcaattgaggtgatcatagttgatgagctgaccctatttcctaatggatatcttgaccttttgatgtgcatgcttggaaaagaagtcaaaaggaagaagattgtgtgcatttttgacatttatcagtcaagataccattcagagtcagacacaaacatcctagggcaggttcatgatgttgatagaattgttaaaaataaggaaataagctatcttcatcaaagttatagatttatctcaaatttctttgactccttttttaaagatgtgacaataaataaaaaagttgaagaaaaatttgaggtaagagtctatgactgtcaccttaaagcacaaataattgaggaggaaaaagggagaaaaatagatgcaatacttgttgcatcaagagatgaaaagaatgctttaagtggcaaagtagaagtaatgacctttggggaaagtcaggggttgagcttcaatagagttgcaattgtcctctctgagaattctgaaaagcaagatgaatatagatggatggttgcacttaccagggctagaatatcaatatgcttcattgtgatatatagaggtggtttgtcagttttccttcaaaactgcggaaacaaattgattggggcattcattaaagggcaagaatgttcactaagaagattgaggatgatgagcgttgccaaagaaataacattcaaaaaagaaatgattggtggaaaatctgatgaggttgacagagaagaaagactggaaggtgatccatttcttaaacccttcatatttcttggaatgaggataaattcagaagagccagaaatgtgtgaggttgagatagtggaaccaaaaggaaaatctcacatctgtatagcccaggaaaattttgctttatcaaggaattttgaccttattagatcaaaagaattgagggagtacagatttagggaatcgaccaccaatcaattctgtgataattatgaaagagttggcacaggtgcatcaaaacacactgccggaccacttcgatttgaaagcatttatccaagacaccaaagtaatgatgatttgactttctggatggcagtgcataagaggctcaaattttcaaatgaagcaaaagaaagggcaaagcttaaagagtcaagcatggtggggcagctgttgtattacaaccttaaagagaagctaaatcttagtttttctcatgaccctgggctgttatcacaatgcataaatgattttgaagttaagaagctctcgaaaagcaaagcaaccatagccaatcatagcataagatctgacatggactggccaatgaatcaaatctttctatttatgaagagccagttatgcacaaaatatgagaagcaatattgcgatgcgaaggcgggccagacccttgcatgcttccagcatatggtgctagttaaatttgctccatattgcagatacatggaggcaatgattagatccaggttacctgatgagatttatatacactcaaacaaaaatttcaatgaattgaatgattgggtagttaagcacttcaaaggtgaaacctgtgttgaatcagactatgaagcatttgatgccagccaagatgaatacatagtctcctttgaaattgcaatgatggaggatatgggaatgccaaattggtttatcaatgattatattgacctcaaatgcacactggggtgcaagttagggcattttgcaataatgagattcacgggtgaattttgcacctttttgttcaacacacttgcgaatatggcgtttaccttttgtagatatgattggaggaaagggcaaccaattgcatttgcaggtgacgatatgtgctccttgagcaatctagaggtgtcaaacaagtttgactcgatatttgaaaaattaagtttgcaggccaaagtgattagaactgaaactccaatgttttgtggctggagacttagcaagtatggaattgttaaagagccagaacttgtattcaacagattcatgatagccaaagagaggggcaatgttgatgaatgcctagaaaactatgcaattgaagttagctatgcctacagtttaggtgagaggctatttgaagttctgaaaagtgaagaacaaattgagtatcaccagtgtgttgtgaggtttataatacaaaggcttgaaaagatcaaaaccaaggttaaagatcttttttcggatcagagagatgtctaa

SEQ ID NO: 693 - DNA, 4261 bp, Fig latent virus 1
  source 1..4261: mol_type = other DNA
tgcgacttgcgcgtaccatttcaacagaaacgtacccatgatacgcaagctattaggtgtcgcgttgaaatccaggcttggcatcaggctgtaccgagctcgatccatagtacgcgcagtgtgctggaatttcgccttggcacgcggtcgacaagaccatatgctagaccaggcctctgattctttagtagtatctatacttacttcacataaagatgtttctgattattttttttttagagatatccctagacgcgtctgggtagttagggatttgtgcgcccggattcagaagggcatggatggttgggcgagcatccctttgaaaaagacaatacaagattggctatgtgaccactcgctcgggctttgtgagcgcctcaacctggtggatgattttgagcggaaactcatgcggcttaaagatatcgagctggacctggatctagaaccatttatccgaaagcccgaatctgtgcttgaatctttcgattctctctggggcctggatgctccttcttcaaccttggaccgacccgctgagccatacaccggttactttataagtctaagatacagggtagatttgagagggttcttggagagagtggagcgctacatgcacagacgctctaacccaaccttcgccggtcacttgggtccaattctgccaatctgttacccgatgccggacaaagtcatggctgaagccgtgaccgtcagtagtactgagccaaccgagcccgaattggatacgagccaaccacccagagacaggataccttacccctcactgatgaggagactgcaccgaccagcttttatcttgcaaccggactaccccccccatcggtcaggatcatggagagtggctccatcttccaagagatgtttcagctacgggcatgctcccagtattaccgaatccagggtggcagatgcgctggaagagatttttatgagacctatggctcaatcaatgctgtaccaagtctatgatcaggatgcgtccataggtttccatgccgatgacgaggagtgctacgacctctctgataaccctgtcctcacgataaatacaaaggggttcgcgaagttcatgtgcagagatgatagaggtgaggtgtcattcgatctggtgcctgggagttgtttactgatgccaaacgattaccagacaagagggaagcactcagtcaggagctgctcggctggtaggacctcaacgacattcaggatccagaggcgtgatgtgcccaaaggcaaagtcagtaagggtctcactaacgaccaaccggccccgaaagagcagctgacacagcaggatttcgagaatctgtctctcgatgatcaggtttcactctgtatgccatacagctgcttcttcaagtgtttagcctcggaaaaagacgatgtgtcggccatcctgttacaatgctcagaatacctctggtctgtataccagaacaggggcacctcagtcgccactgctctcaggatttgcaaggacatgggttactcagtgcagatattggagggcctcaagatcaccaaatcagacagtgaggggctactcaaaatcaagttggagaacggacattatgaacttgtgaaagacttctccgcctttgatagcctcacccagaacaagaagaagaagagggagtccagtggtgccaagctcgatttaggttctctcaaagtctcagatggcttctactctcagatctcattcaaagcactcaaagtcgccgctgagaaacttgtggttagcctactggatggtacatcaggcatcatctcccagggtgtgcggggcgagggcttcagaatagtcccgggggccaaatcagagcagactgcacttgacataattaggagagctgaggacacgacaaaagatatcgtcacaatcctcggtttcgcaggatcaggcaagagccacggcctacaacagagaataaatgctgagggtaagccccaaggaatcctactgctgagcccccgcaggcaactaatggaagattgggtgaagaaatgccccaaactgagctgcaaaacatttgaggctggtctcaaggatgatctccgggcatacggttgcgtagtgctagatgagctgtcactcttcccaaatggttacctcgacttgctgatcatcaaggcgaatttactgggtcatcaaaagcttcagatagttgttgttggggatccaattcaagcaaggtactacagcaaggatgaccagcacaggctctacaaggagcacgaaatcgataggcttggggaagtcaattatggcctatggacacacaggttaccatcccgactggcagataaactttccgtggaaacaaccagtgaatgtcctggaaccgaggtagtggtccataactcactacctgaggcccgagctgcagccagaaagaagaaccaggaaatagaggtaatcttgtgtgcctcccgagaggaaaagaagagctttgaagacaacactctgacgtttggggaatcgcaaggcctcacctttgatttcggcctcatttcactgtcagaggaggcccgcttaagcagtgaccagcaaatcctggtggccgtcaccagattcagaaagggctttggtttcatctacaatgccaaaggagactacaaaatttttgccagaaactgtaagggcctcctcttgagaatcctcggtaaaccaaaggtgtcaattgattatctcatgaacatgacaaaatccaagctcaaaataaataaacttggtggtgtcggggcgggcctggatgaacgggatagggaactgaggttggcaggggatccctggttgaaagggcaaatcttccttgggcagagggtaaacatggtgtctgaaacagaggctctagttgaggagcaattatccacccacaagatccacctgcccataagcactgagaaactcataacactcaacatgggcttttccaaatccaaatactgcagggagatcaaaacaaggtctggtgcctcaaatcaaattctggaggaggatagggggcggggttccactgatttaccgcaaccttgcctggttgagtcgagatatctgaaccatagctcaaaggatgatgtcaccttctgggctgctgttgttaaaaggttgaggtttgcaaagccggaaaaaaactacagaaaatacctacttgcgaaacaccggggtgatgcaatgctgagggccttcctagaattggttccactaaaaccaatccaatcaaacctccttctaagtgaggctgaagctgactttgaagaaaaaaaactacaaaagagtgctgcaatggatagcctgccattcaatagatctgacccagatgcggcggcggatctcgtcaaggtcctttttgaaaaaccagcctttgcacaaatttggaaaaggttcgtcttagcgaaggcggggcagaccatagcatgctttcaccatcggatactccttcgctttgccccaatgtgcagatacatagaaaaggtctttagtctccaatgccccagcaacatctacgtgcatcagaaaaagaatttcgatgtgcttgaggcttttgtgcgtgatcacttctctggcgacttgtgcgttgaatcagactatgaggcctttgacacatcacaggatgcatcaactctggccttcgaggtggctctgatggagcaccttaagatccctagtcattacattgatgactatatagtcatgaagactacactgggctgtaagatgggatctctcgctatcatgaggtttacgggcgagttctgcactttcctcttcaatacattcgccaacatatcattcacctccatgcgttatgtgatcccaaggggtacacccctacttttcgctggtgatgatatgtgtgccctgcggaacctcaagctccgaagtgaatacaatgacactcttgataagctcaccctcagggccaaggtctgcaggacgtctaaaccactcttctgtggttggaggttaactaagtgggggttatacaaggagccaatcctggtgcttgaacgcctcttgatatcaattgaaaggggtacattgaccgacacgataaattcgtacttcctcgagttcaagtatgcctatgataagggtggaaacctggaggatataatggatgaaggtcagcttgatgcacatcacaggtgcgttagaatatttcttcgacatcaaaacctgctgcatgacctcaactacagtaccctccatgaggggctggattga

SEQ ID NO: 694 - DNA, 4947 bp, Arracacha latent virus V
  source 1..4947: mol_type = other DNA
ctctctagcataggggttcatacttcagtgaactcttttcgttgccactctcatccaatatctaagatgttggaaaatcatattttagtgaatgtgttttcccactatttaaaaaagaagaacctgtttgtttcttgtaggaactctaaaataaatgctgtgctcaagaacagcaaggccaatgttagttatgaacattataatagatttgtgcatgctaaggacccgctccgctacacggagtttattaaggaattagattatagttttatgccagcattagttagaaaaggaaacggtgcagaggtgtgcttcatccatgatgaggtacattactggtccatagaaaatttccaggatttcttagggcatttagaatgtgagcaagttatttattctatagtttatcccgtagaaatccaaatgggagtaccgttctccctaaacccgcacttgtatgaattcgaggatgaaggtgagggtacattcaggtggttcccagatggcaaggcgtcaggctcatacgttcaacccataaatccttggctgttgaccacatcaaaaacggaagattcaagactgaggggttggagtatcacgaaactggagagtttcggggctcatcatgtcttcttggctaccagggggatttgcaccaatgacaaaagggattgttataatgactttgcttgtatcaatcccttgagtttctgtagcaaagtgagcaggggcatgaggagaatccgaagctctttagctaaggaggtgtttacctacctattggcgctacgcaaaccggagcctcaatcagcggtggcaaaaatccggcaaatgagcaaaggaaacataatggaggatgaggtgatgtttcttgggttggtcgcaagaaagctgcagggaatgaacgtattttctgaaaaaaagaacacgagcatcaacgagttctcggtgatagagctgttcacagatgtactcatttcttgccttggtgaaaaagcgagcctcttcttgttccacaaaaagaagatagcatcggacctacagggtctacttggtttcttatcccctgctgagttcaagattcagaaagtattcagagagagaaagacaaaaagcatcaagtacagaataagtaatgctgttctatctgagagcgtaatggatgaagagcttggcggggacatacaactgaacgaaattagatgcggcggaagggactctgcttcttattcggctaccaaagaggagctgctcttgccaaggattgacatcgggttggtggagttcatgacctacgtcaaaaggctgcgggactttttcctcaatccacccgcggcatacgaaagctcgactatgttctatgctgatatggtggagccgatgaagagatgctatgtgtggatcagcaaggactggggtctagtgaagcaggtgagactgatagccggtattaatgatgaggatagcttaagaggcgggttaataactgccgatgagtacctcaggaggaaagagcctaaggtggcgacaaaggaggaatcacctgagataaggagcctgaaactggagaagccgcagctgggaggcgtttcttgtgaatgcaaaatgagcttcgagaccggaaattaccgaggaaaggggctggacctagtggatggtgacaaactgaagaaccgggaggcatggttttactctagggggggtgaatcatatacctatacaggagccacgcacaagagtaggggctggcccaaagagctgaatgaaataatcggttcattaggttttaaagctgaatccttcaaccactgtctcatccaaagatacaaaggtggcgctgaacttaaaatgcacaaggataacgaaccatgttatccatcgaaaaacagcatcctcacatggaatcagcatggtagttgcacctttagtgtccaatgcaataagggtagcgtgcagctgggattggaagaaggtgaccacatcatgatgccacagggttgccaagagagtcacaggcatggagtgaatggatgctctgaaggtaggatctcgtacactttcaggagcacagaggagcatgatgttaatggaccactccgtgtacttgatgaggacagtgatggtagtataagctcctacgaggaatgtgatgaagaggaagatactgccatagggggcttggagaaggggcggaaagtgtgtgccctgaatgctttgagtgcgcacctgggtctcaaccacgaaacaataatagccaaggtcctaggggaggacaaaagggcagcgctggccctcaaaagtggtggtatatccttgtcaactctcctgcgctgttgcaaagcattaaacctatccggatgcgtacatagcgagttcggcggttttaggatgaatggcgtgatcaaggaaatcaatatgtacatagagaatgatcacgtggagttgagcgacagggtgtgcacatccagaggcctgaggagtgcaatgctactgaaccctgaaacgagcccggtgacctttagcgccaagaaagaatacgctaagaatctggtcaatgcatttacagcttatgagacaggggtgatcatcaaggagcggttaagcaatgtgcatttggagtccaagattcatgagctgatgatgagctgcgggttcgcaggtagtggtaagagtcactatgtgcagactgtgttgtccttcgagagtgccccacaaacgctaattataagcccgagaaaggccttgaagctcgattggcagaagaaggtgcacaaaaagcacgtttgtgagacctatgagaaggcactgctctccctgcacaggtttaagaatgtggtagttgacgaaattgatctattcccagagggctatctggatttcttgttgtgtgcaagtgattgggagtgcgttgtgattcttggggaccctttacaggcccagtattacaaccaggatgacaggctcaagttgggtggaatcccggatatgttctcgaggatcaaagggaagatcaactatctcatgtactcttatcgtctaccagcgaaccaagaactatttgaaatcaattgctatggggacggaaacgcaaagagtaagaagagtgatgcgcaggtcttggtatgtgctagggagggcctagttggacgggagaaagcctatacagtcggcgagagtcaaggtttgagcttccaggacgttaaactggtagaggataaaggcttgaggcacatcaaaaacggcacaatgatggtggccatgacccgctctcgtaacagcttcatggtggatgctaagaagacgcaaggttgctctttcctgaacgcagtacaaagtgggaggcgtataaccaatgccgagctcaaattagaactaagccagcgattgagtgaatttagttgcattctatctccctatctcgtgagcaatatggagagcattgaggagaagttggccaatgatccgtacctgctaagcctcggaaatttgtgtttcgatgatgagccagatgaggaggagattgcagacgaatggtgtgccgaggaggccatgaggacccatttattcataagcgaagagagcaacacgctatactcgagcacgcttaagagtaaggaggatagagagcacgtgtctgagcatactggagcttctgaccaaatagatgagataggatcaacgagagagcacacaatggtgggccccttaagctacagaagtcgatacctggatcacaagcacgcagatgataccactttctttatgtccgtcaagaagaggctaaggtttgcagattatgagaggaacaagaaaagctacgaaagaaagatctgctatggtgagcagatgtttcagaaaatgaaggagttccttagtctgcccgatagcccttgggtgagtcctctggaggcaagtgagcaagagtttatagaaaagcgtgcaaagaaagcaagcaaattgattgcagctcatcaagacagaagcgacccggactggccatcaaattacgtgaagatattcctgaagcagcagttgtgcaccaaaatggagaagaggggggctgatgccaaggcgggccaattaatagcctgtttttctcattctgtgctttatcggttcggagccataattaggcagagcgagaagactatgagccatctattgcctgctaattggctaatattcacacaaaaacggtatgaggatctggatgaatggtgtaaggagcacatgaatgagcaggtaggaacagactcagattatgaggcctttgatcagagccaggacgggaccatactagcttttgaagtggcgcttcttaggtatttgcattggccggaagaattggtggaagagtacaaagaactcaaaatgatgatagggtgtaaacttggaagtttacaggtgatgcgtttctctggggagttcggaacgttcttcctgaacacttgctgtaacatagcgtacaccatcatgcgttatgagatcacacccgagacacccatagcatttgcgggagatgacatgttctcaccaagggtactcactgttagccacgcctacgatcacttcatagagaacaagagcatcataaagctggtggccaaggttagaatatccagtgatccattattctgcggttggagaatgacggtctatggcatcattaaggacccaaatctcttgctggatagatggaaagctgcgatagaaaaagggaacctcaaagaatgtatggataattatgctcttgaggcctccttcgggtaccgagtcggtgacaatttgtatgatctggacattgacctggacgcacaaagtgaattgacaaggagaatcataaagcacaagcaccagctaagcaggggggttgccgagatcttttccggaggtggggatgttgcatcagatgaggaggatgagtggaagtacctctttggtgcttaa

SEQ ID NO: 695 - DNA, 5970 bp, Actinidia seed-borne latent like virus
  source 1..5970: mol_type = other DNA
atggcttcaattgcagtacgcactccttatgagtctttttttgctgcaaacagtaaagatgaccagagacttttgctcaactcaggtcttgaattcgttaaaagagacttggacacaatgggtgtgcattttgcatatcaactttcctcacagaagaaggaagcattgacaggcatgggtgtatcattacatccagtacctttcttatcccactcccatcctttctgtaaaaccgttgagaaccacatacttctcaacatcttacctgatttgatgggaaatggtaaatggatcttctcttctattaaaaaaaggaagattgacactatagtcaagaaacgtggtgtccaagcatccaatgtagattttgttaataaagtaatatgtgcaaaggattttactagatatgatttcgatcccaagatacatgacgttagaacgaacatgtcatctagggattttattttccctaatagttatattaaggcttgccataataataagatatttatacatgatgaaatccaccactggtcagtggatgacatgatcttcttcctcaacagttcaaatcccaaaatgcttatatgctcagtggtgtatccacctgagctattgagagggattaaacagccgcagaatccaactctatactcgtttgaagtcgacgagaaaaaaaaaaaactctttttctttcctgacaattgcaaaagtgaggcatatgagcaacctctcagacttgattggttgtttgaggctgcttacattgacactggtgttaaaaggtacacggtcaaactgattaaaagtgcatatgcacatcatgtgttccaaataacgcccggtgaatatgtcactgagagtaagaggttttttaatgactttgacacggtggatctgtcaatcatacatgagaacagattcaagtattatgattacataccaattaaaaggtcacatctgcagaaggtgtactcatatttactgtgtctcaaaaaacctgatgttgagtctggattggctaagcttagacaaatgtttgatgaggaacaggattgtagagtagttgaatttttttcaaaattttgtaaagatataattgaaaaacacaaaaataaacttgagatctatggatttggctggttagaggctgttaaagattcattcatcaagaacctgccaatcaacatggcaagatgctttagaagatgggaattcaagaatatatttgatttcctttttaatcttaaaaccctttcaatatctgttgaaaccagagtagtgacaagaactttcacaagctccttcattgattatatatgtgaggaggtcaaaggggatcagagtgttgatgccataatgaataccaaatggcatggaacagaacctgagaagattcagaagtggagcacaagggttatgaaaatgcagtgctatgaatcttacaggaatggagcagtaaagaggattagtgttctgctcttccttaattttgaggcgcagaggtttaaaagggaattggcctcaaaattggacgggagaacaccccaaattaaattgctcaaatacactagagaaggtccctttctcccgccaaagtggctctttgaagaagagtgcagcaaaaagaagagagaaggggagaagaagaaatctttgaaagataatcctgaagagattgtcaaagtgaatctggtcacatctggatggtatgtgaaggttgacttgtcaacctttttgaggggccatgaagaagggaagaaggaagagaaacatcacccagaagaagagggaggaaaagggaaaacctcaaaagaaaatctaaaggacgggggtgaatatagaaagagagaagaggaaaaagacaaaccccaaagaaaaaaaggtgatgtaaagagtgaagagggacaaaaggggagcatatctggctataatgaaggatccttaagaggtgaagatgagagaatcttgataactagagaattgcttatggatagttgtgaaatcacaatctctagtgaatctgtcatctctgaaaagggatgtaagagaatcattaaagttgttggtgatggtaattgcttctatagagcattaagagtttgtcttggacacgatgaggaaggctatagcatcacaaaggagaagttgcacaaaagtgcatctaaatctgaattcttcagactggacaatgaactcattgatgagcttatcacagagggagtttacacctctgacgagctcgtcaaatttatagtgaaccttgccaacatagaattaagagtctcaactggaggctacctggattctttttcatcttacaaacctaaattggccaaatatgacaatggaccggtgtcaattgtgcacatgcatttggagaatgagcattttgatgcagttgtttatagccctatgcaagaggatgattcaacccttgcagatgaaggggacattattttaaaggagggctcttttgaagcgctctcacttctcaaattcgagggtttcaaagtaactcaacttgcatcaagaaaggcttttttccttgtaagcaatttggacatagactatggacataataagattcggtacaaatcaaatctgtacgacattgaacagttatgcccaaaggaactatacaagggttacaatgcatgcctcatacaaatatttgaagaaggaggcagcatcggcatgcacaaagatgatgaggtatgttatgacaatggatccatattgtcaattaatcttaggggaagtgccattttttcatattcagatgggaaaagagaagttgatatccctatgcatgaaatgagctatttagtgatggatagtgcatttcaaagaaagaatagacattccgtaaaagggtgtagcaaagggagaatcaatgtaacattcagaagacacacaagaaggatgaatatggaacccctgattgacatatgtgaagaagtcaaggcaatgaaaaaccggtgcatgattgatgcaattgcagagaatgaaggacggtccaacataatggtgatgaatgcactactcaagaaagatagacctttttgggatgaatggagaggcaatgacaatggaggcactatttctgatctgataaaagctgcaactgacctaaacttctcatttgagattgatactgctgatggaataaggacgtttaataacaaaggtcccatgtttatgtttgaactcagaaataatcattttaagagttcaaaattagacaaaataggaaaggttatgacagaacttgaaaaaagaaagcaagaatcagcagttgaaagttcatttggtgaagatgtgattaggttaatatcaaactctccaggattcaataaatatgagtttgaaatagatattgagtatgtgatgaaaataattcactcattcagaaacagaatgacaggagttgctttgagtgacatgtattcgaatggagaatctatttttgaggaagtcattaaaaagataaacaaatgcgtgaatgcaactcgagaaaggaagaacaagggagaggcacaagaaagattcaaccaagtggttgaaatcaattgtgtgattggattgggtggatcaggcaaatccaattcaattcaaaggtttctcaaggtgcgtaggaggggaaaatttatagttatctcgccaaggctgaatcttgcaaatgattggattgaaaaaacaggatgctgccctgagaaggttaggacttttgagacagcattaagagtcaaccttaagaaggtggaggtcataataatagatgagttgactctatttccaaatgggtaccttgacctgttaatatgcatgctaggggatgaaatcaagaagaaaaagatagtctgcatatttgacatataccaagcaagatatcactctgactccgatgtgaacttaattggacaggtgcatgaagttgacagaatgattaaaggaaaagaagtgaattatctacatcagagctacagatttatctcaaatttctttgacactttcttcaaaggtatagcaataaataaaagggttaaagaagattttgaggtgagggtatatgactgtcatcttaaggcacaaatcatagaagctgaaaaaggcagagagataaatgcaatattggttgcatcaagagatgagaagaaggttcttagcggaaaggtagatgtgatgacctttggagaaagccagggactgagttttgacagggttgcaattgttttatctgaaaattctgaaaaacaggatgagtatagatggatggttgcattaaccagagcaagaatctcagtttgcttcataatcatatatagaggtggattatcagtctttctgcaaaattgtgagaacaaactgataggtgcttttattaagggtcaagaatgttcattaaggagactcaggatgatgagtgtagcaaaagaaatctcattcaataaagaaatgataggtggcaaatctgatgaagttgacagagaagaaaggttggaaggtgacccctttctcaaaccattcatattcctggggatgagaataaattcagaagagccagaaatgtgcgaagttgaagtggttgaacctaaaggaaaatctcatatatgtatagcgcaagagaattttgctttgtcaagaaattttgatctaatcagatcgaaagaactgagagaatacagatttaaagattcaacgacaaatcaattctgtgatagctatgagagggttggcacaggggcttcgaaacacactgcaggtccattaaggtttgaaagtatatatccaaggcatcaaagtaatgatgacctcaccttttggatggcagtgcataagagactcaaattctccaatgaagcaaaggaaagggccaaactcaaagaatcaagcatgatcgggcaactactttactacaatttgaaagagaagcttgatctcaatttctcacatgatccagggttgctgtcacaatgcataaatgatttcgaagttaaaaaactctcaaagagcaaagcgacgataaccaatcacagcattaggtctgacaaagactggccattgaaccaaatatttctattcatgaaaagtcagttgtgtaccaaatatgaaaaacaatactgtgatgctaaagcagggcaaacgttagcatgtttccagcacatggttcttgttaaatttgcaccatattgcaggtacatggaggctatgataaggtcaagattgccagatgagatttatatacattcaaacaagaacttcaacgagctcaatgattgggttgtcaaacatttcaagaatgagatatgtgttgaatcagattatgaagcatttgatgcaagccaagatgaatatatagtatcatttgagatagccatgatggaagacatgggaatgccaacatggttcataaatgattatatagatctcaaatgcaccctaggatgcaaacttggacatttcgccataatgagattcactggtgaattttgtacattcttgttcaacacactagccaacatggctttcactttttgcagatatgattggaagaaggggcagcctatagcatttgcaggcgatgatatgtgctcactcagcaacttggaggtgtctgacaaatttgattcagtgtttgaaaaattgagccttcaagcaaaagtaataagaacagacacgccaatgttctgtggatggagattgagtaaatatggcatagtcaaagaacctgagttagttttcaataggtttatgatagcaaaggaaaggggaaatgttgatgaatgcctagaaaactacgcaatagaagtcagctatgcctacagcttaggtgagaggctttttgaggttctgaaaagtgaagaacaaattgaatatcatcagtgtgtggtgagattcataatacaaagacttgaaaaaatcaggacgaaagtcaaggacctcttttctgaccaaaaggatgtctaa

SEQ ID NO: 696 - DNA, 6273 bp, Zhejiang betaflexivirus 1
  source 1..6273: mol_type = other DNA
atgtctcttacttttcgctctcctgctgaagaggcactatcctccttctcatccgtcgaacaatcccaaattacgcgcaaggctcttgccacgttcataagtattgaagagagggaacacaccttcttcaattatgccgtcaagatacatgccaaggagcgtttgacgaatgcagggatatacctctctcctgtttcaccaataccacattcgcatccagtatgtaagatattagagaattatcttttgtataaagtcctaccaagtgttatagataatagttttttttttgtcggcatgaaggataataaatttgcagcttttaaaactagggagccaaaattagatatgattacctgtatcaatagatttgtcacaagtcatgataagaataggtactttggctggagatctgcgaagtgtagtgtatctgagtttaacactacagtggacaaatcgccttgtttaaaggacttagttccccaagtgctaagccagcgtgccagaaatatatttctgcatgatgagattcactattggagtcgtagggagcttattactttcttagaggtggcaaagccagagagggtcttagctacacttgtatttccgccagagatattagcaggttcaaaggtgagtctaaatagatggtgttatgagtatgaagttagggagtgtggtaggaatagtgcaaatggattgtttaactttagggcagcatttcgtggtgatagtgggaaaacccttttcttctaccctgacggggttagggctgaggggtacgaacagccacttgattcgggctatctgctcaaaactaggagtatagtgtgtaatgatggtactgtctataatgtagatattgtatgctctaaatttgcgcatcaccttgtaagtattactaggggtaattttgttgggaggtcatctaggtcttttggtgatttcgaagcaataactacaaggggtctgagtaaagtctcttctaacatgaaggatgcctaccccatatgctacaccactgtaaatagaatatatagatacttgaggtcattagtgaagccggacgtacagtctgccgtgtcgaagttatcacagactgtaggcgaacccacaggggcagagattaaatttgtggaggagttctctaaacttgtaatcagcacccacagtgtgaacaatttgataggcaaagatgactttaaggtgctgcaaggtcttgtggcggggacattaccaagaatgttcgcacaaaagttcaaggagtttagggccatcagtcttgatgaatttatatgtgagttagcaccttactcttttaatgtggatctagttgacctcaagggtgacacatgcttagattttatattctatgacgtcacttatggttctgtcactaaagaccccgcagtgctcatggagaaggtgttcactgaaggttccgagagagtgagattgaatggcctctatcactgtgatgagccacacacgcacgttttggaactgagtggtgcagctacaaccagacttttcagtcgatttatcagagcgtacctcggaaatttgcagcaccaatatagtgtggagaaccttagggagtgcatcagtaatttcaagaggtggttcaagagtagcaagatattgggcctttcattttattccatggaagaggaagatgcctccagaatctaccggagagtgagggctggaaaattcattcgtagagaagtgatgtttcaaagggatgggctcatttggttcttaaatcggaacatcaaaggcagtggcaaatggtactctggcaatacaaaatttattactggagatgaccgcggtattgcgaaaatggatgttgatgtgctatgcacttacagaagactgctgactgagctcacaaatgctagccaaaagctggtacaattggagataggtgaagattctccctgcctactaaataaacccacaactcagggtggggttagtgaagcactagaagcaccaaaagatgatgaaactggcaataaacccactttaggtgtaactttcccagaggcaaccactgaaccgagaggagaaaacgtgggggaagaggtagcatttagagatgaggttaccagaaggataaaagaaatgatgaatgcacgggcggcaatcattagtgtagtaaactttgaaggattgaaaattccgatttacaaactacgcacgttagggccccttgcatttaatctcactgatgatttgggaaatagagttgcatcttggtacacgaaagggaaacccgtggcatatagatataagggtggctcgcacgagtccaaaatttggttagacatgttcaacaatttgctaatctttaatggtctaccaacggattattatgacagtgtactggtgcaggagtataaagccggtgggggcataaattttcacaaagatgatgaggaaatatttgaaaggggggccaaagtactcacagttaatttatatggccagtgctacttctcattctcgagtcccaaagaaaccgtgtcttttgaattactggaagactcatattttgaaatgcctcaagattttcaagagaaatattatcacggggttcagggatgttctgtagggaggatttctatgacatttcggaggttaagctgtgacaagcagagtggggttgttaagcctcaatctacagcgttagtcgagccaagcgaccaccccactgaaactcagggaaatgataaagtgaacaatgaagttagggacactgaaactagtgggagctctgaaggaagtggggatgacgccacagaagtgagtcaatttggctttgacaagcacaaattagcgaacatcaacctggttgttaagaagtattgtgaaagtgagatgagcagaatgcttttaagcaagaaagtagttgctgagtgtaattatgagggtcttaataggatttgcgcctgtgaactaggcttaaatgagcaatacgttaaggagaaggctgaccacttcatgcaggtattgccgatcaaatcagcagagatgatatctgacttcatctcagactacaatcttgatgcatgcttatacaacttaatgggagcgattaaaatgttcaatttgcaagttgtattattcattccaggacactgtttaacaatccaggtggaaggcaataacggcaaagtcattgagctcgcttgggaagtaagcacacagtctttaaaattactccggtgtgcaaatgattgttgcataagagctgtggcggacgcacttgaaagaccagctgagcaggttattgaggtactgaggtgtaagggcggtattgagctcatggaagaggtaacctctggccaaggccttgagctagagcactttgagcaggtcctcactctttttgatatatgcggggtgtgcttcggtgattttgacacagtactgaatgagggtggtagactcctattctatttctacatcgaggatgggcatgttgagcattttgttaagaatagaagctccagtaaagataaaatagaagctcttaaaaacagggaagaccttttagatctcaaaaggcaagatggagtgattggagccagaggaggcagtaaattcaatctcaggaggggtagaaagggtcctgatcccaaggataactacattctagacctatccgcagtcaaaccagctagcaccagtcttaaatttgtgagcacagagcagaggtttaacctaattaagaatagcctgcttgttggtgacacgggtgtgctctttgacaaaaattttgacaagataggcctgttagaatccagggagtggaatgaatggagtggaatgataggggttatacttggtgtatatggctgtgggaagagcacactattcaagaaactagttagtaaaaaccctagagcctatattcatattgtatcgccccgaaaagccctcgcaagcgaaatgaagctagccctcgaagaaagtagtgacgagcaaatccggaaacgaggtcataataccacagtgtctacatttgagcgtttcgtgcagagggcattgcaaagcaaattcaagtgtgacgcgttgctcattgatgaaatacagctctacccacctggctatttggacttggtcgttaatttggtgaagcctaaggaggggacagttttccttatcggagacccttgccagagtgattatgactctctccgagacaggttgactttcagcaacataaagccagatatcgagatgctgcttgaagatagggagtacaaatataatttcctcagtcgcaggtttaggaacaagaattttattggcaggttgaattgtgtgtttgacgaaggtctaatgaattttgaggagccttatgtaatctgcaataatttcgaggaatgtcgtgccctcacaccaaaataccatgaaacatttcttgtatcaagttttgaggaaaagaaggtggtcgcagtggaatttccgaattgtgaacagatcctcacattcggcgagtcaactgggcggaatttcagatatggaacactggttataacaggcacctccaggtatgttaatgaaaagaggtgggtaactgcactaagtaggttctcacacaatttagcattccttaacctgacgggctatgggatcgagagtgtctgccagcagtactcaggattggctctaaatagattcctgacagaaaaggccggcccaaatgaattaatggagagcctccctgggaagccagttttgactaaaggattcacaagcagaatgggcaaggattatcaagtaaaagagctgaaactgcagggagatccatggttaaagacaatgataaatttgggccaattagaagatttccaagaggaagaaatgagtgaagtcattaaccaaattgagtcagtgaagacacacgtgccattatcgtatctagagggagtgagagccacgtggaatgaccggtttaaggccaaagaagatagggagtttaagataaaaggtttgataaccgaccaatttgctgatgagcattcaaagaacaacggctttaaactcacaaacgctgctgagagatttgcagccatctacccaaggcataaaagtggtgacacagcaacattcctgatgggagtcaggaaaagattgagattctcaaagccttctgtggagtgcgccaagtatagggatgcagcttgttttggaccatttatgcttagagagttcctgaagagagtgcctataaaaccagggcggtcaagtgttttttttgaaaaggctgtgcaggactttgaggagaagaaaaccgcaaaaagcactgcaactattgaaaatcactctggtcgctcaaacctggattggaagatagacacaggtctggtattcatgaaatcgcagaattgcactaaatttgagaatagatttagagatgccaaagctgcgcaaactattgtctgtttccaccacatcgttttagccagatttgcgccttttataaggtatattgaaatgaaggtcaatgaggcactccccaaaaattattatattcacagtggcaaaagtttagatgagttgaataattgggtcatttgtaatgatttcaccagagtgtgcacagagtcagactatgaggccttcgacgcgtcgcaagatgcctacattctggcctttgaagtctgtctcatggaacacttgtgtctccccaaagatctaattgaggattataagtacatcaagacacatttgggctccaagttgggaaatttttcgataatgaggttctcaggtgaagcatctacattcctcttcaacactattgccaacatgttgttcacttttttgaaatatgatttgaatggttcagaatcaatctgcttcgcaggtgatgatatgtgcgcaaatagaagattaagacttaagacggagcatgatggctttttaagcaaattgaaattaaaagctaaagtctgttttacatcatcaccgactttttgtggttggaatcttagcttctatggaatatacaagaggccagagttggtttttgagagactctgcatagcaaaagaaaatggcaatttcagggagtgcctggataactatgcaattgaactctcttatgcctacaaattgggtgagaaggtcctccccttgatggacgaaagcgctgtgcagagttactaccagtgtattaggataatcatccagtggaagcatttgctaaagagtaaaattgctttagattttgctaatagtgtgaaagcttag

SEQ ID NO: 697 - DNA, 5583 bp, Zhejiang betaflexivirus 2
  source 1..5583: mol_type = other DNA
atggctctaacctatagaacccccatggaggatattgtttccagttttgaaccagctatgcaatcagccattgcttcaaaggctgctttgagttacaaggagcttgaggaaaaaaactttcaagcttttaattttcatctcaaagctgaagcgaagcaaaagttaagtgcagctggtgtttatttaagtcccttctccgctgtagtgcattctcatccggtttgtaaaactcttgagaatcacatattatattcagtattgcccaactatgttaataatagatttttctttgtaggtattaagaattctaagattaatttgttaaaatctaggaaccccaagctttctgttattagtgctattaataggtacgttaccagtaaggatgtttgtaggtatagtaatgattttgtagttaggagttcaaaggagatagctggcttgagtaggcataaagcaaccctcgctgaagcaacattaagagatttggtgcccaatttacttaatatcaaagctaaacacctctttatgcatgatgagcttcactactggagggaaaaggacttaattaccttcttggaggtggttggtcctgaggtattgctagcaactgttgtttatccacctgagttactagttggatctaagcagagtcttaatccatggtgttatgattttgatgtaaagggtaataagttgctatttttcccagatggggtgcgatctgagggttatgaacaaccactcaaaggtggatacttattgacagctaaagaaattcatttgcccaatggtgaggtgtattgcgttgatcttcttcatagcaagtacgctcatcatctgatcagtataaccaaaggtgctgctgttacttgtgattatcgctcctttgatggttttgaagctgtggcctttgggggtttggtgaatctatcttcaagtagcaacccctttttcccggtctcattcgatttggtatctaaaatgtaccgttatttgagatcattgaagaagccagattcgcaatcagccatggctaagttgagccagattgttccagaaccctcagccagcgaaatcaaatttgttcaggaatttgctgatttagtggtgaattgtggtaatgtaaatagtttattatctgtgagtagacttcgtcttttcctttgtcgagtctatcaaaaagtgtttccagcatggtacttagacaaaatctcttcaattaaggaattatgccttgatgattttattaggcaattaaaacctttttcttttacaaaaaaaacaaaaatcataaatctcaactatcttgaagatatgcttgactggagtgagtttgattccgaagatgggaaggatctccataaggttgtggatgaagggttcttctataacacagttcttggagattctaagagctcaattgagctccgctttagtcaaccttacattggcctggctcccttaagtgattctgctactgaaggcaggattaaattttctgtgccaagggatgccttggttaagggattgaccaagattatcatgaatagtttggcagatcaatccctttggggcataaatcatattcaagttaaagcagcactcacttccctacttgaaaatagatcaattctgctaaattcaggagtgtgttttcaagaagacctgattaacagtatagtcagtttgattaacgctaagacagttcgtctagccacaaaagtcagattcaggtttgattggggatggttcatggcctttaagtgccatagattgaacaccagattcttgactaattactctgagagctgggttctgccgaaggccacaagtgctgcttggagctctattgtgaatgaacttaacaggcagtcattcaagttgcatccaacccaatctggaaattcaaattctctcaagggtgttaactttaatgaagggagcgatggaagggataatgcggcaagtacctctggtgatcaagagattaactcccagttagaactgctaaatgttgatgcttccattcttgatcaatttggtttagcagacttgacaccagaaatgctgaaatctgctggactatctgtacccaaaaaagctaatcttgcagttttcaatcctgaagtggcagaatgcggagaggaggaaataaagaccgattcatcagaatcgtcaactaatcttttggaaattactgagggggaggatgttgagcaacttaaaggaaaagagcaaaggaaagtgattggcagagtgtcacttaaaattgatgatatgcagaactataatgtgcttcaagaggacactgatctactaaatttgatctcaaaagaccttggctacatgagaagtgaagttagtaaacgcttagatagtcttggtttatttaacttggactctgctctatccaatgaagatcaaatatttggagttattgagtctgctaacctcttattctctctcaatttaattatcattttgagtgatttccaaagtggtgggtggaaattgttggctattgaaagtggtgatccaaacgaaatttgcaagactctttggatccaagaagatggtggttctttcaagaaagtgattccaaagaacctttgtgttgtgcatgctgtatccaaagctttaagaagacgcccagatgaagtgattaatgttctctcacaaaaagattacagagatcttttttctgatctcatgcagggcaagggccttgagctcaccagattggaattcatatttgatatattttcaattcatgcatttgtgcaaataggatcggagttgattgaagtaaacaaagagggtaactgctgcgcttgctttgaccttaaggagcaacaccttgaatatattggtgctacccttaaccagattgggtgcaaattaacatctggctgcaactccaagcaggaatttgaaaggaagactataatgcatctccagagtgtggggtcagaggtaatattcaaagcaaaggtgtccagagctaaattgttagctgattgcttacactctggcaatactggggtaattagctctgagttgttcaatggcaagccacacctgctagatccctttcttgagcggaactcaaatgtgttaactgaagcaattgaatcaggtcttgagagaaaggtaatcactgtattgggaacctttggagtcgggaagagcagcctctttaaacaaatgactactggagccaggggtcagacctttgactttgtttctcctagaaaagcattacttgaagaaataaagtgtgatcttaaagttggggaggatgctaaggcaagaaagaggagaggacagcagaattggttcttcaacacttttgaaaaatttttaaacaggtgtggaaaattgaaggagtatcaacttgttttcattgatgaaattcagttgttccccagtggctatttggacttgctgtccttcttaattcaagttcccatcagtttggttgtttttggtgatccctgtcagagtgattacgatagtgaaaaagatagggattttctgggaaccatttcaaacaatgttgaggcactgctcaagaatcgtgattacaagtacaatatacttagccatcgatttcaaaatggtaatttcctgggtagattgccttgtttgatgaacgaggagaggtttggccagaacaacctgaattatttgatttataatgaccttgatgacctagctcacttgcctttagagtatgaacaagttattttggtgagttcatttgaagaaaagagggttgttaagagttacgttcccgaagccaaaaagatcctgacttttggtgaaagtaccggattaaattttgattatggaactatactcataacaatgatttctgagaggtctaatgagagaaggtgggtcacagccctgagcagattcaggaaaaacttagctctggttaattcaactggattgtcaattgatgggctagctctggtatacaaagatagattcttgggcagattcttatgcggcaaggctgatcctgagcaattgagggtgctcctacccggacgtcccattttcactgaggggttccaaactaaagtgggtagggatgaaggaatcagagaagagaaactggctggagatccatggttgaaaagtatggtagacttgtttcaaattgaagattgccaaattgaggaggtgcaagaaataatacagcaagtggaggatttcaagatccacctacccagagaagaaatggaaggtacaagaacaaggtgggttcacaggatcctgaataaggagtttagagaggtcagaatgggcacaattgtgtcagatcaatttaccgatgatcactctaagcagagggggggccagcagttaactaatgcggcagagagatttgagacaatatatcccagacatagggccaatgatacagtcacttttataatggctgtaaaaaaaagattgagattttctaagccgcacattgagaaagccaagttgagctctgctttaccttttggcaggtttttgcttaataagtttcttgaatttgtacccctgaagagaatgcacaatgtggcgatgatggaggccgcccgtcaagatttttttgacaaaaagacatcaaagtcagctgctaccattgaaaatcatagcataaggtcttgtagagattggctagctgacattgttcaagttttctccaagagccaaatttgtaccaaatttgacaacagattcagggttgctaaggcagcccaaagcattgcttgcttccaacactctgttctttgtcgctttgccccttacatgaggtacatagagaagaagcttcaagaggccttaccgaaacgattctatattcattcaggcaaaagtttggagcaattgaatgcctgggtccttacttctggttttgatggtctgtgtactgaatctgactatgaggcttttgatgcttcgcaagaccagtacatagttgcttttgaagttgaattaatgagatatttgggcctcccaaatgacctaattcaagactatctatacatcaaaactcatttggggtccaagttaggcaactttgctatcatgcgttttacaggggaagccagtacttttctcttcaacaccatggctagtatgcttttcacttttttgaggtatcaaatcaaaggcaatgagaacatttgcttcgctggggatgatatgtgctcctcaaaaaagttgattgtgagtcaggaatatgacaattttctcaagaagatcaagctcaaggcaaaggttcaacacacctcaaagccaactttctgtgggtggcacctgagcccagatggtatttacaagaagccccaattagtctttgagagaatgtgcattgccaaagaaactaacaacctccagaattgcatcgacagttacgctatagaaatttcttatgcatacaaaatgggggagcgtgttactgcccggatggatgaggaggagctgggtgcttattatggttgtgttagaaccattattaagaataagcaccttttgaagtcagaagttaaggctctctatgagagccttgattaa

SEQ ID NO: 698 - DNA, 6003 bp, Olive latent virus 3
  source 1..6003: mol_type = other DNA
atggccgcttcatggacttccttctcctctctcctctccaaccctctctccctcgcccagagaatcctcaccccccctcacaatccttccattccctcccttcccaaatctggattccgatccgtcacctctctctccgatccctctgatgctctcacccgagctcagatgttctccccaaccaaagccattctgtctcctgccgcttccccaaccccagctagccaacccgatccacccgccgaaccgtgctctgatccccccactgaaacgactgtcccatcctcaaaacgtgctctcttggactcccattctccgtcccccgttatacctgtggatgaaacagcccctatcagccctcccatcagactcaccggttctggtctcaaagatctcgttgacttcctgaaccccaccgttcatcgagacacaattgccgcccctctcctcgaaaccatatctcaacccctccgagactccctccgaacttacccctggtccgtgcccccctcactccaaacacacctccaatccctcgggattaacgcccataacttcggatacaaacctcaccctcaccccgcccacaaggttatcgagacccatctcctacatgagcattggcgccacctcgccactcagccttctgctatactatttatgaaaccctccaaattccagaagctccacaaccaaaatgacaacttcaccgaactgcacaattacagattgacctctaaggactccacccggtatccggagacctccaggtccatcccaaacctccccagcatcttccttcatgacgccctcatgtatttcaccccctcccagatcctcgaccttttcgaacgttctcctgccttggagaagtgtttcgcttcgctcgtgtgtcccccggaatcaaatttcaccgacatctcattctacccagaactctatcgcttccgggccgtcggcgactccatcacttacgaactcgaagggaatccagcctcctcttatacccaacctaaatccgctattgagtggcttaagatcaccaccatcaaaggcccaaatttctcactctccatcaccatcctggagtcgtggggcccgtgccattcacttctcatccaaagagggctccttccactccaccaggaacactccacccaagccttcaagacccccgaggctatcctcctcccagccccctctcacctccaacaggatctcagacaccgcctggtcccaacccgagtttacgaatctatcttcgtttacgtccgagcagttcggacgttgcgagttactgacccttcaggctatgtccgcacccaatcatccaaacccgagtattcgtgggtcaccacggctgcttgggataatcttgccaactttgcacttctcacctgcgcccatcgacctcgagcccgatactacctgtactggagcacccttgaccgcctcatgggctggattcgagctcacaagctcgcccttctcacggcctcgaccccccttgcctcccttggtctcgcctccagcgctcttctcgcttgcaggcctttttggatgcgtcttgactctctccaactccttaacagatgggtcatcaaaccctcatttccgcgcaaccttccattcctcttgcccaaggctttccaacccaaggcttctctcttcaaagccgaatttcttccccgccatgccccatcccgcatcctccccgaattcttcgacgccctcctcaagaaagcccccttcctgcgacctctcttctcagatgctccaattccctcctgggcttgggccctctgtgctaccggcgttgccataccaatcatcgccctgtccatccgacgattcttgggacccaactcacctcaagccctccttgacgagtaccagtcttacttccaccccaagccttggcaactcatcttggagcaggggcccatcttcgccaatcctgagcctttctccccccattgtcaacccattccatcgtccggcccagactccgccccttcttccaccctagggacaccaccaatgtaccccagctcacccccagccccagtcgaagagaaaaccatcctagtcccaacggtccgcgccctccccccagctccgcctccatcctcagtcccacctccctccaagccatctcccgccgccccagctccggtcaccccacccagcctcccgaccccagtcatccccccactctctacgcccaccccagaaactcgcgtgcctgaggttggtaagtccggcattgttgcctcagacctcccaccaacagagatttccccaaaccccactcttgcccgatgtcgtcccaacttccttggactctgtgccccccaccccaactcgaaccccagtcatcctgagccctccgccccatcccccttgatcaccgacccttccggatccctcactgccatcaacccaacccttgaaccgttcgaattcaatcacgccctccttggcgccgacccttcaggccaaggccccgtggctcaattcaacgagttgtttccatccaccctctggctccaaggcaccggtgagttcctcacccgatcccgcgtacaggccccctcctcagcaccttaccccgctatggactgtctcctgcacgcgatccacacagccacccgaattcccaaaccgaccctgtgggccggattgtgctccaatctacctgattccttcctcgacccccaactcatagctaaacatggtttatccacggaccacttcgccgtgctagctcgcctattctcccttcgctgcaccttccaatcccgctctggaacccaaaccatgggcgtggctgatgccactcacaccttccgcatccgccacactccacccaccgaggacgcccctggtcactttgagtacatggaggagatccctgaatcactgactggcgccttcgcacaagatctcgcccatttcgccctctctttccgctttaacggttacctcctccccttcaagcatgtacacacctacacttctaacgtctcccgcgccaaaaatctcatttcgaacatgaaaaacggattcgatggagttatggcctccgccgaccctctccatcctggccagacccgcgaaaggttcctctcgatggacaaccaactcgacatcgccgtcccacgcgaaacgagattgatccacatcagcggcttcgccggctgcgggaaaacctatcccatcacccaactcctcaagaaaccggtcttcagacagttccgagttgcagtgcccaccaccgagttgagatcagaatggaaggaccttctcacccttgaacccgctgatcgctggaggatcggcacatgggaatcctcccttctcaagagcagccgagtcttggtcatcgatgaggtttacaaaatgcctcgcggttatcttgatctccgccctacacctctgattcgtcccatccaatttgtcatcatcccttggcgatccccctcccaaggtgagtataactccacccacccccattcatcaaacctccgaatcacatcagaaatcatccacctccaaccttacattgacttctattgcttttggtcctacagaatcccgaagaatgtggctgcgtgcctcaaggtaccaaccacgtccaacaagactggcttcatccgccgcctcaattccatcccgaacgccaacaaggtcctcacctgctcccaaagttctatgaaaactttgaaccaatgtggtttctccagcgttaccatagcctcctctcagggctctaccctccaggaagcggcttgcatccatcttgatcgcaactcccgcaatctctccaattcccattccctcgtggcgatcacccgcagcaaatccggcatcatcttcacaggcgacttccaccttctcgacggcaccacttcctccaactaccttttctcatgcttggctcagggcaagtctgttgaccttgagatgcttttcccgaagactttccctccctgccctcgtctcctccagcccatccgatcccgacgaacaatccttgtcggctcctcagaggactgggcccagttctaccgcccaactcctctcgaagatttctccagattccaagccacccctgtacccgaaacagctattccctgccccaacggctatcagggttcgcccgagatgatcgaaggcccctcacacgccaacctccccttcgaagctgaccttgactccatcgacccattggaaggcgagacctcaccctactccctaggtttcggcgtacacgccagaactgctcgcaccaccaacccagaagccactggcgacatcatcacccaatcagagatcgtcctcggagacggtgagctgaatatgccacaggtctcaacccacttcctccctgaaacccgccgtcctctccactttgacaatccctccgcgctgccctcctccaccgtcccctccccggtcgatctcagtcgcactgcattcgaacccgtttacccaggcgaaactttcgagaacattgccggtcacttcatgggaccccgtgaccccgaagttcttgagatcatccacaacgaccaaatgtccaatcagttccctctccttgaccagcctttctcattggccgcccaaccttcatctctcatggctgccatccacaactcccagaacgatcccaccctactcccagcatccattggcaaaaggctgagattccgaccctccaacgctccttaccccatcaccgccgaggatcagatcctcggctccctcctgttcgaagccctttgtcgcgcttaccggcgacacccagaagccgtcgtgcccttcaaccctatcgcattcgccgagtgcataaatctgaatgagtatgcccagttgacctccaaaactcaagccgtcatcatctcaaatgcccgccgatctgatcccgattggcgctactctgcagtgcggatcttctccaagacccaacataaggtcaatgacggctccttttttggttcctggaaagcctgtcaaaccctggccttgatgcacgacgcagtcattctcctcctcggaccagtcaagaagtaccagcgtctcttcgactctgaagaccgaccttctcacatctatatccatgccggacacacccctcaagacatgagcaactggtgtcaacagaacctcacagattccattcacctcacaaacgactacacctccttcgaccaatcccaacacggcgaggccgtcgttcttgagcagatgaagatggcacgactttccatccctcaacacctcattgatctccacacccaccttaagtgcaacgtctccactcagtttggccctctcacctgcatgcgactcaccggcgaaccaggcacctacgacgacaactccgactacaacctggccgtgattcatctgcaatacgccgtcggttccaccccctgcatggtttctggcgacgattccctcctagactccaaacctccaatccgcgatgagtggaccggaattgcccctctcctcgctctccgcttcaagactgagttggatcgttactccctgttttgcggctacttcgtcggctcttccggcgctgttcgctgccctcgagcccttttcgcaaagatcatgatcgccgtcgatgatggttccattcccctcaagatcgcatcctacctcacggaattcagcattgggcactcgctcggcgatgaattctggcagctcctccccgttgagcaagttgtcttccaaagcgcttgcttcgacttcttctgccgcaattgtccaccagccgccaagctcctcctccgcctcggtgaagcgccccaatcaatcctagaagcaacttttggtaagctcaaatgggcctccaacgcggtttactccatgctctcagccactgcccgacacctcctcatcaaatcccggctcacccgaccccccccagaaagcgtcgaggtctcccagctacaaggtcaattgcttgcctcttttcaacattga

SEQ ID NO: 699 - DNA, 5496 bp, Andean potato latent virus
  source 1..5496: mol_type = other DNA
atgtcttttcaaacagctctcgaagccttgaactccacagttcatcgcgacgcagcaacaaatccgatactgaactctgttgtcgagcctctccaacagtctcttgttcagtacccatggcttcttccaaaagaagtccttcccttcctcctgtcctcaggaattcccaactctggcttgggaaccactcctcatcctcaccccactcacaaagtcatcgagactttcctcctttacaaccactggtcttgccttgcaaaccagccctccaccatcatgttcatgaaacctcagaagttccaaaaacttcggaatctgaacaacaatttcacccatctctgcaactatcggctcactccagccgacaccacaaggtatcccaccacctccctacatcttccaaacactcccgtcgtcttcatgcacgacgccctcatgtatttcaatccagctcaaattctggatctcttcctcaactccccgatcatcaactcgctctactgcagtctgatcgttcctccagagtcagacttcaccgacctgtctcttcagccaatcctctaccagttctcaatctccgggcagactctccactatgtcccggaaggccacaacgcaggcagctacaaccagcccctgcacgctctcgactggctcaagatccacagcatcctctcacgagaactcaacctctcagtgaccaagctggactcttggggcccggtccattccattctcatccagagaaacctccctcctcttcatccagctcgccagtctcccatcaatcactctctctcaagtctctttcctcagcacaatcgcgcccctcgcgcactgagaagccaaagagactcttcccagcaccttcaaagcgccctccaggctttgttcccacctcctcaagctgctcatgccctggcatccttcaaaatcccggaatgcctcgagctcccctcagccacctttctaaaccaacctctccgccatcgtctagtcccactgcaagtttacaatgctctcttcacctacactcgagctgtccgcacacttcgcacatccgaccctgctggattcgtgcgaactcaaagcaacaaagccgagtactcatgggtgactccaaatgcttgggacaatctacaaaccttcgctctcatgaatgctcccatccgccctcgagtgttctacgagtttttcctcaaccccttccagaaactaaaactccattttcgtcagcactggaaaaagtaccttacccttttttcccctgtgatttcgattttggttatttcacctcaactcctcccaatcaagtcccccatcccaaaactccagctagtctccattttccgcagtcaaaaactgcccttctctcacatcaagctggagaaccctctttatctcaagaaattccttccaccaaagctcacccaaagaagaaatttctccattcctataccaatcgctcttggcaacattctgctccatcttcacaaaatcaatccatccctcgccccagttccacccattctaccaaggttccagaccatccccgttctcttaagggaccttcctccaagagcttccaccaccatcccactactggcgctggtcccaacctgcatcatcagttggctccatctcttctcggcgctccccctccaacaaatccacgatctctaccacaccaacatgcacccctcccagtttcgcctgcaatgggatttgcaaccaatgcatgtcgactctccccaacccttccttccctacctcctccccgcgcccacaaatccctccacatttccccaaactcctcttccagtgactcctcctatctctccgcctcaagctcagagagccacacccccgccagcaccaagcccttctccaagctctccagcagaatcagagcctccaatcggcttggtttcctcctcaactcttcccccttcttcaactactcatcagactcctcctcctcttcctaacctatctgatgatcttcttcaagtcatccctccttcttctgacacccccccgtccataccacctgactctactgtcacctacactggagcgctcaaccactccatttctcccactccctttgttccacaacatcttccagccgaacctatcattcccccactgatggcggatcctacctgtgctggagatgtcatcccatttcataatgcctttcctggtctctacttctctaacactgcaagcttccccactcggatcaggattctcccatcttccaatctccctgtccctgctctcaattgcttgctggaaactttttcccagctcactcactatcctgtgctatctctatggcagtctctctgctcaatgcttcctgactgccttctcgacaacgaagagattcgcactgtcggtctttccactgaccttctcaccgccctctgcttcacctaccacattcaatgcatcctccacactccttctggcaatcatccctatggcatgccagcttcctccacctccatagaaatagattacctcccaggccctcccaggcatttttccccccacaatcgtttcattgcttcagctcccggctccaacccttcttccgaaccccttgttcgcgaagctctccgcttcaaacacaatggccattttctacctttccaccaagctcatctccattctgtctctctccaacacgccaagaacctgatttccaatatgaaaaacggttttgatggcatcatgcattcaatttcaacttcttcctcctcttccccatcaccaaagcaacagatcctcactctcgactcaatttgtgacgttgctcagcccagaactgttcccgtcatacacattgctgggttcgccggttgtggcaagacccatcccattcaaaagctccttgcaagcaaaccattcaaggacttccgcatttccactcccactaatgaactaagatccgagtggaaacgagacatggatccttcccccagcaatctctggcgcttttcaacctgggaatcttctctcttcaaacactcttctgttctgatcattgatgaggtctacaaactcccccgaggctaccttgatctctcaattcttgctgaccccaacttgaaactcgttttcatcttgggtgatccactccagggtgagtaccattccaccaaccctcatagctccaatatccgccttccttctgagatcgatcgtttcaggcgctacattgattgctactgctggtggacttatcgcctccccaaacttgttgctgagctattccaaattccaactttcagctcagaacaaggttccatcattgctgtctcctctcatccccctggctcaaagaacctcgtcaactccacgtccactgccacttccctccagcaaatgggccaccatgccatcaccattagcagcagccaaggtatcacctttcctgagatcaacaccattcttctggacaggcataccaatctgctcagccccaacaactgcctcgttgcaatgacccgatcccgcaaaggttttgcatttgttggcaatctccacctagcctccaactccttcggcacctcctacatgttctctcaagccctggcccgccaacccatcaatatggccaattgcttccattccttccaccaactccttcttctccatcatccaatcaccactagaaaccttaggtttgtagctggtcaccaatccacccttcccaatgttcacaaagcccaccaaaaactttccacttctggtaagctttctcttcctccccatatcccaattgaccatgctgaagacttcatcatcacaaatccagttgtctttggcgacgccattgatccccgtcttcccacaaaccatctcccccccacccgtctccccctccacactgagctgctaggaaccaatccttcttccaccgactcatcatctcctgacctcctcttcaacacacccttctctctcggtctttctggcgaaacctttgagaatcttgcagcccacttcttgccagctcatgacccttctctcaaagaaattctttatcatgatcagtctagtctccagttcccctggcttgacagacctttttctctatcttgtcaaccctcttctctgattgctgcaacccactctccttcacaagattcaactctactccctgcttccatcaagaaaagactccgcttcagggagtcagatcagccctaccagatcaccgccaatgaccaactcctcggccagcacctcttctcctccctttgtaaggcctacggacggtccccactcagctctgtccctttcaaccccgtcttgtttgctgaatgcataagcctcaacgagtatgctcaactctcctctaaaactcgagctacaatcgttgccaatgcccagaggtctgaccctgattggcgtcacaccacggtcaagatctttgcaaaggctcaacataaagttaatgacggttccatctttggatcttggaaggcttgccaaacccttgccctcatgcatgactacatcatcctcatcctcggcccagtcaagaaataccaacgagtcatcgactccaaggatcgaccacctcaactttacattcattgtggtcacactcctcaccaactttcttcttggtgccaaacccatctctctggtcaaacttacctcgccaatgattacacttcttttgatcaatctcaacatggcgaggccgttgttcttgaacttctcaagatgcaacgtctcaattttccatcttttttcttagatctccatctccacctcaaaaccaatgtccagacccagttcggcccactcacttgcatgcgcctcacaggcgaacccggcacctatgacgacaactcagactacaatctggccgtcatattttccaagtacttaatccactctcaccccatcatgatttctggagacgactctgtcatctgcggaaatccttccattcatcccagctggtcttcaattgaacccattctccacctcaagttcaaaactgaaaccaactcccatcctctcttctgtggctattatgtctctccccttggtgctgttcgcaatccctttgctctatttgccaaactcatgatctgcatcgacgattgcactcttgatgacaagattctttcttatttgagtgaattctccgttggtcacacacttggagattccttaattcatgtcatcccatcagccatactcccctatcagtcagcctgccacgactttttctgccgcaactgcaccccatcccaaaaactcctactttctttggatccccttcctgaatccaccattctccggctcatcctcaaaattaagtgggcatccaaagcctttttctctctgttaccttccaaagccagggatcttcttgtctcaaaaggctcactccaatcaatgccgttcgatcccaaagttacccaacttgagtctgaattgcttccctttttcaattcaacttga

SEQ ID NO: 700 - DNA, 5427 bp, Asclepias asymptomatic virus
  source 1..5427: mol_type = other DNA
atggcttttcagctcgctctagacgctctctcccaaacctcccacagggactcgtcccttcaccctgtgctggactccgtaatggagcccatgcgcaactctctcaccacctttccctggatggtccccaacgacctccagccctttcttctccaagccggaattcaaacttccggattgggcactacccctcaccctcatcccgtgcacaaagtgctagaaaccaatcttctcttcaaccactggcacttccttgccaaaactccatcctcggtgcttttcatgaagcccgagaaattcaacaagctccaaaagagaaatccaaacttctccgagctcctgaactaccgagtgaccccaaacgactcggtccgctacccaaccacctcccctcacctcccaaaaacagacgtcgtcttcatgcacgacgctctcatgtactacactccagaacaagttctggatgtcttcctccgcattccaaatctgcagaaacttttctgcagtttggtagtgcccccagagtcagagttcacgaacctctcactctcaccaaatctctacaccttccaacttcacaaccagacccttcactacatcccggaaaaccactacgccgggtcttacaaccagcccctatcggccattcaatggctaaaaatctcttccatccaccacccccagattcaactttctgtcacaatcctggaatcctggggccccctccactcaatcctcatacaaagaggcctgcccagccaacatttggccggtcccaacctcttttcatcccttctccaccccctcccctcccctgcagccgacctaatctcattcaaaattcccgagtgcatcgagctgcctcaatccaccttcctctcccaaccccttcgtcaccggctcatcccaaagaaagcctacgacgccctcttcacctacacaagagcggttcgaaccctccgaacctccgaccccgccggcttcgttcgaacccagtcgaacaaaccagaatactcctgggtgacttcaaacgcctgggacaaccttcaaaccttcgcgctcctgaactgcgccatccgaccaaatgtggtctacaactttctccgcaaccccttccaaaaactcaaaatttatctaagccaacactggcgccgcatcgtagcggtctccgctcccaccctatccttcctaaccctccttcctcacttcctaaactggtctttatctctcccaaaggtaaagtgcatttcagccttccgccaccgcttcgaccagcccccccctcaacctctagccctccaaattttccacaagctagtcaaccatctacccccccaagttctccagactctttcaaaagtctgccaaaccttacatctgccctcacccctccccccaccccgacccggaattctcccgagtttccgcatctctcattccgcctatcccatcaggttcccaacctggctctccctcctcgcctgcttggtgccggaacttctagttctaggctcaaagctcaccggcgatctgtccgtgcaacagcagcacgacctctaccaccaccatctccacccagcccaataccacctccagtgggaaagacttccctactcgacgacttcgaggcaaaactttctgcccttcgagcccgtcgccactccatctcctcctcaagctcccctcgctcaacccccccccaaatcccggagcaccagcccccagcacttcacttctcccagctggagctcaacccaactttccccccacctcagcccccttcccacccaaccctcttcccccccccccgacttcatcaacatcccagtctccccctccaccacctttcgacaacccaccaccagcttcctcaccaactcctccccaagaactaggagcctctatgaatatttgctccagtactaccaccccggcccccccccccttccccaacccgcatctaacggatgccactgcgagccctgcacccaaagtgaagcatccagccccacccaaaactttcccctccaagacccctcctccccctacattgttccacccgacccttcaaccccaattccagagccccctctactgaaagatctgtcttgcactggaccgatcctcagcttccaagacctctacccccgcaactactacccaaacaccgcgctgttcctcaccagactccgcatcacccccccaaaaccactccccctcccaccgaatgactgcttgctccaagcaatctctccttctttgtcagtcagtccatccagactttggcttgctctccaggaaattattcccgactgcttgcttgacaatgaagaagtccatcgcttgggcttgtccaccgacctcctgaccgctctctgccactacttcaacttcaaagccgaggtaatttctgacgggacctctctgcactacggaatctccgattctcccgtccaaatccaaataatacatacctctggctctcctggccactacagccctcccccaaaactcactggcgccactccaccaagagaaccgccccaccctcttactgaacagctcctccgcttcaaattcaaaggagctcatcttccattctccaaagtccattcttactctagctccgttgcccatgctaaaaacctagtgagcaacatgaaaaatggctttgatggaattctctctcttgtcgagagcaatgttaagcatgctcctggctgttctcccagagataaaataataatgctggaccgtctccttgataatgccgcacctcgctcagttcatttaatccacatagccgggttcgccggctgtggcaagacccatcccctccagcacctcctcagaactaaacccttccataacttccgagtctctgttcccaccaccgaccttcggaacgaatggaagaaagacatggctcttccttcaagtcagtctcatcgcttcaacacctgggaatcctccctcttcaaacattccaatatcctcgtcattgatgaaatctacaaactcccccgaggttatttggatctctccatacattccgacccttccatttctctcatcatcctccttggagaccctctccagggagagtatcattccacttccccccactcttccaatcaccttcttcaatcagaaactgagagactctcgcaattcatcgaccactattgttggtggacgtacagagtcccatcccacatttctgatctttttaacgtcccttcctacaaccaatcccacggacctttctttggaactgtccgactggcctcatcctactccccaggacaacacaacctggtcaacagcatggcaacttcagccgctgtcaatcaactaggctatccttcctgcaccatcagctccagtcaaggaatgactttccgcaaacatgtaacaatcctccttgacaaacactcccgactcctttccccaagtaacacactggtagccctcacaagatccaccgctggcgtggaattccttggagaccccatgtctctatccggcaccaacaactcttctgacatgttctccagagcgatgcatcaaatgccaatcaatttggcaacctgtttcccgagaatcttccacaagctcaaccttcttcgggaaccaatcaaacatcgatccaagagactccttggatctcgacccccctccccaatttacctcaaccccaagaaaatgcaccttccccctcacattccaatcgattatgcactcgattacgtgttgcacaaccctcacgtctttggctccaaagatgaccctcgactggaatgcaactttcttccccccactcgactcgccctacactccgacttaatctccgccaatccctcagtcccaagcctccagcctgttgactccgatttccgcacaccaatcacccccgtttatcccggcgagaccttcgaaaatctcgcggccttcttcctccctgcccatgatcctgagcttaaagaaatactctacaaggatcaaaacagtcaacagtttccctggtttgaccgccctttcgagctatcttgccagccctcctctcttatagccgcccgacacagtccttcacaagacccgaccctcctcccctcctctattaagaaaagattgaggtttcgcccatcagacaacccccaccaattctccgccgatgaaataatactggggaatcatctgttccactcactatgccgagcctacaatcgaaacccaaaccaaactctccccttcaatccttccctcttcgctgaatgcatagctctcaacgactacgctcagctctcctccaaaaccaaatccaccatcgtcgccaatgcttcccggtctgacccagattggagacatactgccgtcaagatattcgccaaatcccaacacaaagtcaacgacggctcgatcttcggtccttggaaagcctgtcaaactttagcccttatgcatgactttgtcattctcagcttggggcctgtgaaaaaataccaacgacttttcgaccaagctgaccgaccctcacacctctacactcactgcggcaaaaccccgcaggatctttctctgtggtgttcagcccatctctcccacaaaaccaaagtcaccaatgactacaccgctttcgaccaatcccaacacggagaatccgtcattctcgaagctctgaaaatgaagcgcctctccatccctgagcacctaatcctccttcacatccacctgaagaccaacgtctccacccaattcggacccctcacctgcatgcgccttactggagagcccggcacttacgacgacaacactgactataacattgccgtgctctactctcaatacaacctgcaaaacacccctgtcatggtctctggagacgattcgctcatcgactccaaatgccccgaactcctctcctggcccacaatccaatccaaactgcatctccgcttcaagaccgaaaccactgactatcccctgttctgcggctactacgtcggctcatccggagccatccgcaaccccctcgctctgttcgctaagctaatgatcgctatagacgaccagtctatcagcgagaagaggcttagttacataactgaattctcagtcggacattcacttggtgactctttctgggatctcctccccagcgagattcatccgtaccaaagtgcctgtttcgactatttctgcagaaactcccccccccatgaaaaatccatactgcacaacctccccttcagccccacagctctctccactatcaccagctccattaaatggctctccaaatctgctttctccgctctgcccatgcgaatccgccgagcagccatagagaagtctcaattaccctcttcccacgagaacccagaagtttcccgtctagagtctgaattgcttcacaattttcaatag

SEQ ID NO: 701 - DNA, 5247 bp, Erysimum latent virus
  source 1..5247: mol_type = other DNA
atggcttttcaactagccctagacgccctatcctccaccactcaccgagattcaatctcggctcctcttctcgactcttctgtgagtcaactccaatcttcattggaactattcccctacactgtcccaaaggaacttgtcccccagctcaatcgcatgggcattcaagtctccggactaacctcaactcctcacccccacgctgcccacaaaaccctggaactgaaccttctcttcaaccattgggcaaagtcctgcaatgtggactcagccgtggtcttcatgaaaccctcaaagttcttcaaactccaagagaagaactcccacttcaaatctcttcacaattaccgacttcaccctcacgactccaatcggtacccacatcccagcacaagcctgcctacagagaagcgattttacatccacgactccctgatgtattttacgccgcaccaaatctcaggtttgttcgaaagttgcccaaaccttctcagtctgtacgccagcctcgtcgttcctccagaaagctcaatgaccgacttgtctctaaaccccgatctgtatcggtactcaatccacaagtcgactctccattacacaccagaagggcactcagccggcagttacaatcagcccgtcaacgccctcgattggctgaaaatctctgcgatccaaactccatccctgagcctgtccgtgtccgtcctggaatcttggggccctctccattcccttcttatcgagaggagctctcaaacacaaaatccagattctcagaagataaaggatctgatttccttccaaaccccccaagctctaattcttccgaacccggactccctggccgtccctctcaggcaccgtcttgtgcctcagaaaacttacgacgccctcttcacttacactcgagcaacccgaactctccgcacttcagatcccgctggattcgtaagaactcagtcaaacaagcccgagttcaactgggtcacatctcaagcttgggacaatctccaaacctacgccctcttgacagcctcttacaggcctcccgtgtcctacacgctacatcggtctcctcttacaaaactcaaggagcttctcacgaggaatgctttaaaactcgcagcgatggcatcaccagctctcactctggccatcttcaccacaatgaccgcgttgaacaccaactccagcaaggccctctccttcagtgctctcaagattcacttgctgaacccacttacaggcccggaactccttcacttccaaacttctgtattgcagcaaaagaactcagctccactcagccaagctgaggcgaaacaagaattggacaagtcagctgtgccagcaccttctgaacatgactctagcgcctctcaatcaactagcctctctctcagcgcttcttcccaacttcttagcaccgaaaagcatcccggctccgagctttcttccaaagctatcccggtctctacatcctgcccctctgcttccaaacagcttgctcctccgctcactgctgagtctcactcctcagtcaatgcgcttctgcgcaaattcctgggtcccaactctcctcaatccaatctggacaattacaatttgcatctacatcccgagtcgttcactctgggctggaaacgacgacccctacttttggactctcattcaagtttcctaccctcttcttgccttcaacctccagcatctcccagcatagcagcagctcctcaccctcttcctcctgctcagaagcctccccggccacctaccactgtgcccactcccaaacctctagcttctccttcccaaactcaagctgctcagccggccacacaatctcctccttcgattccccaaacagccccagttacttcactcctcccggctcccctagaaactgatgactcatgcgctggcccaatctccaccttccaggatctctttccagccagttactaccctcacacagccaacttcccctgccgatcaaaaataccgggctatcttgaagctccctacccccctctggattgcatgctggtcgctctctctgcccaaatgcctcaatcccctcaagagctgtggtcagcgctcaacactctaatgcctctaagcgctctcacctcacccagcctccgagtcttaggtctcggcaccgaggagctcactgctctcagttactattatcactttcaggccgagattcattccgacaatgaaatatatagattcggcatacaaactgcttcaaccaagctctgcctcattcgggattcaggacccccagctcacttcactgctcctgatcctctaagagccggctcccctcccagcagatcccagaccaatgagaattctctacgccgctcacttctaggcttccgcttgaatgggaatctcttgccgatcgatcaagtccacagcttcacttctgagccctctcgcgcaaagaaccttgcttccaacatgaaaaatggttttgatggcattcttacaaccctcgctgcgctctcctccctctcctctggaccctcaccccgcgatcgcatcttcactcttgatggcatctgcgattttgctctacccaaaactgttgaccttattcacctgtccgggtttgccggttgtggcaaaactcatccaattcaacagcttctcaaaacccctcacttccacaacttcagggtggtcactcccaccaccaaccttcgatcagagtggaaatcagacatggctctcccagcacaccacaactggagattttcaacttgggaatcagccctcttaaaacatgccgaaatactcgtcattgacgaaatttacaaacttcctcgaggatacctagacctttctctcatagctgatcccactgtcaagctcgtcatcctcctcggagacccccttcaaggcgagtatcactcaacttctgctcactcctccaacttgcggctcagctcagaaatcccaaggttgctccctttcatcgactactactgttactggagctaccgcgttccaaaatgtgtcgcaaagcttttctccctgccatgtttcaacccctctgaaggcttcataaagactactctggactttttccccagcgctaacaatttggttaacagccactcagtagtccacatctctgaagcttgcggctggaatgctgtcacaatatcttcgagtcaaggatgcaccttctccgaccctgctttcatccaccttgatcgtaacacagctcttctgtctccctcaaactgcctcgtagctctcaccagatcccgctctggagtttacttcaaaggcgatttcacatttctgagctctctctccggttcctctcgaatgttctcgttagcttactctggccagccgattcaccttccagacttctttccagagattgtcttccaactcaacatgataactgcccctctgacaaaaagaagttccagctttcgatccgggttccaacccaacatctcttctgccccaaaaatcccggcccctccaaatcttccctgcccccctcatatcccaaccaattactcgaaagacgtcattgtgaacaatcaagctctctatggtgagtccctcgaaagacgtttgtctgttctgcatctgccccccactcgcatgactcttcattctgacatcaatatcaccgcaccttcaagcagcagtttccagccctcagacgagccagttccttctgaccacactgctgtctaccctggctttgacttcttcactctcgccgctcactttcttccagctcacgacccagaagtcaaagaaattgaactcaaagaccaaaccagccaacaatttccctggctgaatctagacttccacatatcatgccagacttcttctttgatctctgcaaggcaccaacccgggtcagactccactctccttccagcttcactccacaaaagactccgatttcgccccacagcagctccataccaaatcactccttctgactctttcctaggcaattgtctctaccgctcctggtgtcaagtttaccgtcgcgacccaaatgtgcgattgcccttcaacgaagctctttttctagaatgcattgctgtcaacgactacgcccagctgagctcaaaaactcaagccactattgtagccaatgcatctcgatcagaccctgactggcgacatacttttgtaaaaatcttcgctaagtcacaacacaaagtcaatgatggctccatttttggcccatggaaagcttgccaaactcttgctctcatgcatgattatgtcattctcaccctgggtccggttaagaaatatcaacgactgttcgaccagctggagcgaccttctcacatctactaccatgcagggaacactcctcatgaccttaggcgctggtgctccaaacacttagaaacctctcactgcaccaccaatgattatacagccttcgaccagagccagcacggtgaagccgtcgtgtttgaagtcctgaagatgagacgactttccattccggaaaatctgatatctctgcacgtccatctcaaaaccaacgtggaaacccagttcggacctctcacttgcatgcgactcactggcgagcccggcacctatgacgacaacactgactacaacttggctgttctcaatctccagtacgaccttcgcaaaacaccgacccttgtctcaggcgatgactcctacttatccggaaccctttccccaagatccaactggcctttcgtcaaagagctcctccacctccgcttaaaaccgagcagtctgatcgacggcctcttctgcggttactacttaggaccccaaggctgcatccgcaatccacttgcccttttcgctaaactcatgatagccgaagacgatggctccgcctttgacaaacttccttcctacctcaccgagttctcgattggacatggtcttggagattctctctggcagcttctcccttctgatcttgtgctctatcagagtgcgtgtttcgattacttctgccgcaaagccacacgctctcagaaaatcctactgcaaccaggccttgtagatcaggaaactttagacaagattgctttatcggccaagttcatatctcgtcctttctactcaatgctttcaagccatgctcgcagcctgattagtactaaattcaaactcgactcttccctcaccactctccaagatcccatggttgagtttgaattgcttcccttttccaatgtacaatga

SEQ ID NO: 702 - DNA, 5244 bp, Bombyx mori latent virus
  source 1..5244: mol_type = other DNA
atggctttcaccaatttagtcgatactctcgccaacaccatccaccgagacgccataacggctcccctagtggaaaccgccatcagcaatttccgtcacaagcttcaactttacccatatcaggtaaattccaagctaatcccattgctcaatcaactcggcataggagtcacctcctatggcacttcacctcatcctcatgccgctcataaggccatagaaactcacctcctgtttgaacattggaatcatcttgccagagttccttctacggtaatgtatatgaaacctgagaaattccaaaaacttcagcaattaaacccaaactttgcttccctcattaacttcaggcacaccccaaaggacatcactcggtaccccgttagcaaccctcatcctgtagaaactgaagtagcgttcatgcacgacgctctcatgttcattaccccttcccaaattttaggccttttcaaggactccccttccatgacctcactctattgttctctcatagtccctgccgaagccgcttatggagtgccttcactcttccctgatctctacagctacacaatcaaagatgatcagctggtgtacactctcgaaggaaatgctaccggcaactacactcaacctctccgttctttggattggctccgccgctcaggtatttcatcaggcgaccttcatctatctgtcactttacttgaatccttcgtttccgtccattcccttctaatcactcgagttcctcaacctcccccttccggcgaacatgtatttctaactcctcccgcttccctgcttcctaatccggaaggattggaactgccgatcaaatcacgactcgtgccaactgaagtgtacaattctctgtttacttatgttcgagccgttcgcacgcttcgcgtcactgatccttccggattcgttaggacgcaacgtcaaaaaccagaacattcatgggtacaatcttcagcctgggataatctcgctaactttgccctattgacgtgctcggcccgcccttccttagagtacggtttctgctatagctcatacaagcttttatcactctggatcgtgcgtacattgcgttcgatatcagcttatcacaccggttctcttctcaccatcccaattcttcaccatctttccccttatcagctgtgttatcgaactcatacctttagatggctgcccactcatttggacttccacaaaaccttgccctctttgattcacagagccttcgctagcattactggccgctacatcaccaactccccagagttccccacttcaaccttttctattaatcatttattacaacctttcggcaagtcattgcaaaaattcccttgccattccttagtcattcggccaaatcctgcctccttcattgttcgctgttccactcttctacaacgaaggtggctcttgcttggtttatctgccctcactggcgtttgggcctattaccatctccgccgtggcaactcacctcaggaaaagtccgatgcttatctctcttatttccacccggatccctggagactcaccattcgaacatctaacgtgatggcgattcctcattctttcttccccgattcaggctactcgacttcttcaccgtctagacctccatcccctcacccaattgttatcgaacaaccctcgtctaacgtctcaaaacatcatcaggttcaaaaccaagcgtaccttacaccggctcatcctgagacacccccaagccccagtaaacaagagataaaatccggtgagactcttgccaccggctttccaaatgttgcgacactaagcggcccctcggaagcctcgaaaccagacgcccctcctactcctttaagttccgatccaacagctcatgggcccatcctccctcataaagaactttttggcatttcatctcccgatcacgagtgcacctttttaaatcgcaagcgactcaatgtgtcaatgcttcctttccctgctcagccctgtcttcttgttgcttttgctcaagcctcaaattctacccctcagcgagtatgggctcacctttgcacccttttccctgattcccttcttgatggtcccttagaacgctctcaaggcttcagctcagaacacctcgaagctctcgcctggagtttgaattatcgcgtctcttatcgccatggcgaacatctcaacaccataggccccgatgacgcaccactgctcagccttatttacactggtgatggatccataggtcattgggctgccgacgaatcccctctctccccccccccttcccctattcgaggctcggcaaaaaccctcaattcatttgcttcaacagctattcggtttagagactctcacggcaatctcctaccatttcgacaagttcatgagtacaagctctgtaagcccagggcaaaaatttggcctcaacatgaaaatgagactgatggagttatacaatccagcctccgagcggcatcatcagaccccacttttttccatcgccttgatcaaagagccgacttcgccccacaagtttccgtgcagctcattcacattactggatttcctggttgtgggaaaactttccctgtcactcagctcctcaaaaccaaagcatttaaaggccagtacagagtcgctgtccccaccaccgagttgcgttccgaatggaaagaccacatgaaactcccttccagcgacgcttggcgagtctcaacctgggaaacctctctcatgaaatcagcacccgtcttggttatcgacgaagtgtacaaaatgcctcgaggcttcctggatctagctcttgtagctgatccagccctccaatttgtcatccttctcggagacccatgccaaaccgtctattcttccgtcaatccggactcttctaattatcgtctgatttccgaagtcgaacatctcaaaccgtatcgtgatttttactgtcactggacccaccgacttcctcttcgcctagctcgattcttcggcgtttcgactacgaaccctcaagaaggttttatcggacgtcgagacaacccacacaaatcttatcccatattaacatcaagtcagcagacggcgcgagtctgtgccggtacaggccatcgagcgctcactttttgctcctctcaaggttcaactttccaggctcctgcccaaatcttcgtcgactccaatgtggcttctgtccacgtttctgctactctcgtcgccacaactcgttcccgttctggagtcatttttacgggtaaccatcgattgttccaatcaaggcctggtacggcgccactctttgaggctatgctcaatgaccaacccttcaacttcctcaacacatttgctaatgaacttggaggcatggaactcattacatcaccgatcaaagaacgaaagaccattcttcgtggcgggtcttatgacttttcagcctaccgaagctaccaaaaaagacatcaccggatgaccaactttaaattcgatccagctcataccagggctcctcgctctacatctgccaaaccactacctgctaatgacacctctgacataataattttcgcacctgaactttttgacctccagtcctcagccatcccgagacttgacactcatcatcttccagaaacccgtcgtcctctccatttcgatattccttcttctctccctaccaaagtggacattagtagtgctgaacctacagacaccgccatagaacctgtttatcccggctgcgactacaaaactgtggcagctctaatgatggaaccccgggaccccgactcccttgaaatccgccacaagggggagttctccaatcaatttccatgggtcgatctcccttatgagaatggcgcccaaaccctcagcgttatagcacccaaacatgactcgaaatatgacccgactttactttcggcctccattgccaaaagactccgtttccgaccctccttccttccttacagactttctccttctgacgaagtccttggcacatttctgttttcatctctatgtcgagcctataaacgacatcccaatcataaagttccttttcagcccgaccttttcgttgaatgtatcaatctcaatgagtactcacagctttccaacaagactcaagctgtcatccaagcgaacgcaaatcgttcggatcccgactggcggtacactgctgtccgcatattttcaaaaactcagcataaaatcaacgaaggctcaattttcggcccttggaaagcatgccagacattagccttgatgcatgatgccattgtcttaatttttggcccgatcaagaaatatcagcgagttttcgacagtaaagatcgtcctcccaacttgtttgtgtatggaggccaaactccatacgatctctctcggtttgcttcgtcccatctgaaaccattacaaattcatgtctgcaatgactactctgcgtttgaccaatctcagcatggtgaggccgttgttttggaacggaagaaaatggagcggctttccattccatctcatcttatagacctccattgctacatcaaaaccaacattacaagtcaatttggacctttgacctgcatgcgccttaccggcgagcccggcacttatgacgacaacacggattacaatattgccgtcatttacagcgagtacgacatcaccactcaaactgtctttgtctcaggtgatgattctttagtatcacctccacctcctgctcaccccgattgggacgccgtttctccactcctttctctcacattcaaaaaagagtttgtcagaaacggtctcttctgcggctattacttgggaccggccggagccattcgtgctccccgtgccctactggctaaacttgtgttagccctagacgaccgaacccttcctgacaaaatagcgtcttacctcagtgagtttgttgtaggccactctctcggcgacgctttctggactctcttgccagcagatcaagtgatttaccagagcgcgctttttgatttcttttgccgtgaatgttccaaggaacaaaaactcgccctcaaaataggagaagtgcccgaacatctttgtcagacaatgctttccctcggtttctcctggttatcacgccccctttatgctcttctggataggaccgcccgcctacgtttattagctcgcactcgtttcgcccccctcttttccgatccttctgtagagggtgttttgcaactggatttctga

SEQ ID NO: 703 - DNA, 1083 bp, Arabidopsis thaliana
  source 1..1083: mol_type = other DNA
atggctactgggcaggttctgtttcagcgattctattgcaagaagtctttggctaaatttgatgtcaagatagttgctgccagctgtgtatggcttgcatcaaaactggaagaaaaccctaaaaaagctagacaggtcatcatcgtattccacaggatggagtgtcgcagggagaacttgccattagaacatctggatatgtatgccaagaagttctctgagttgaaagttgaattaagcagaactgagagacatatactgaaagagatgggttttgtttgtcatgttgaacatcctcacaagttcatatcaaactaccttgccacattagaaacacctccagaattgaggcaagaagcttggaatttggccaatgatagtctgcgtacaaccctctgtgtaaggttcagaagtgaggttgtggcttgtggggtagtgtatgctgctgctcgtaggtttcaagtaccactccctgagaatccgccgtggtggaaagcatttgatgcagataaatctagtattgacgaagtgtgtagagttcttgctcatttatacagtcttccaaaggctcagtatatctctgtttgcaaggatgggaagccatttacattttctagcaggtccgggaattctcaaggtcaatcagcgacaaaggatctgttgccgggagcaggcgaggctgttgatactaaatgtactgcaggatcagctaataacgacttgaaggatggaatggttactacaccacacgaaaaggctacagattccaagaaaagtggtaccgagtcaaactctcagccaattgtaggagactcaagctatgaaagaagtaaagtaggagatagagaaagagagagtgatagagagaaggaacgaggtagagagagggacaggggtaggtctcacagaggcagagattctgacagagacagtgatagggagagagacaaactcaaagatcgaagtcatcatcggtcaagagacagattgaaggattcaggtggacattcagataaatcaaggcatcattcttctcgggaccgtgactaccgcgactcatcgaaagaccgtcgtaggcaccat

SEQ ID NO: 704 - DNA, 2586 bp, Solanum lycopersicum
  source 1..2586: mol_type = other DNA
atggctgaaattcttcttacatcagtaatcaataaatctgtagaaatagctggaaatttactgattcaagaaggaaagcgtttatattggttgaaagaggatatcgattggctccagagagaaatgagacacattcgatcttatgttgacaacgcaaaggccaaggaagctggaggtgattcaagggtcaaaaacttattgaaagatattcaagaattggcaggtgatgtggaggatctcttagatgacttccttccaaaaattcaacaatccaataagttcaattattgccttaagaggagttcttttgcagatgagtttgctatggagattgagaagataaagagaagggttgttgacattgaccgaataaggaaaacttacaacatcatagatacagataacaataatgatgattgtgttctgctggatcggagaagattattcctacatgctgatgaaacagagatcatcggtttggatgatgacttcaatatgctacaagccaaattacttaatcaagatttgcattatggagttgtttccatagttggcatgcccggtctggggaaaacaactcttgccaagaaactttataggctcattcgtgatcaatttgagtgttctggactggtctacgtttcacaacagccaagagcgagtgaaatcttacttgacattgccaaacaaattggactgacggaacagaaaatgaaggaaaatttggaggacaacctgcgatcactcttgaaaataaaaaggtatgttatcctcctagatgacatttgggatgtggaaatttgggatgatctgaaacttgtccttcctgaatgtgattcaaaagtcggcagtagaatgataatcacgtctcgaaatagtaatgtaggcagatacataggaggggaatcctccctccatgcattgcaacccctagaatccgagaaaagctttgaactctttaccaagaaaatctttaattttgatgataataatagttgggccaatgcttcacctgacttggtgaatattggtagaaatatagttgggagatgtggaggtataccgctagccatagtggtgactgcaggcatgttaagggcaagagaaagaacagaacatgcgtggaacagagtacttgagagtatgggccataaagttcaagatggatgtgctaaggtattggctctcagttacaatgatttacctattgcctcaaggccatgtttcttgtactttggcctttaccccgaggaccatgaaattcgtgcttttgatttgataaatatgtggattgctgagaagtttatagtagtaaatagtggtaataggcgagaggctgaggatttggcggaggacgtcctaaatgatttggtttctagaaacttgattcaacttgccaaaaggacatataatggaagaatttcaagttgtcgcatacatgacttgttacatagtttgtgtgtggacttggctaaggaaagtaacttctttcacaccgcgcatgatgcatttggtgatcccggcaatgttgctaggctccgaaggattacattctactctgacaatgtcatgattgagttcttccgttcaaatcctaagcttgagaagcttcgtgtacttttctgtttcgcaaaagacccttccatattttctcatatggcttattttgacttcaaattgttgcacacattggttgtagtcatgtctcaaagttttcaagcatatgtcactatcccaagcaaatttgggaacatgacttgcttacgctatctgagattggaggggaatatttgtggaaaactgccaaatagtattgtcaagctcacacgtctagagaccatagacattgatcgacgtagcctcattcaacctccttctggtgtttgggagtctaaacatttgagacatctttgttatagagattatggacaagcatgtaacagttgcttttctataagctcattttacccaaatatttactcattgcatcctaacaatctacaaaccttgatgtggatacctgataaattttttgaaccgaggttgttgcaccgattgatcaatttaagaaaactgggtatactgggagtgtccaattctaccgttaagatgttatcaatatttagccctgtgcttaaggcgctggaggttctgaagctcagtttttccagtgacccgagtgaacaaataaagttgtcatcgtatccacatattgctaagttgcatttgaatgttaacagaacaatggccttgaactctcaatcatttcctccaaatctcatcaagcttactctagcctactttagtgtagaccgttatatactggcagtacttaagacatttcccaaattaagaaaacttaaaatgttcatctgcaagtataatgaagaaaagatggatctctcgggcgaggcaaatggttatagctttccgcaacttgaagttttgcatattcatagcccgaatgggttgtctgaagtaacgtgcacggatgatgtcagtatgcccaaattgaaaaagctgttacttacaggattccattgccgaatcagtttatcggaacggcttaaaaagctgagtaaatga

SEQ ID NO: 705 - DNA, 3156 bp, Solanum tuberosum
  source 1..3156: mol_type = other DNA
atggcttatgctgctgttacttcccttatgagaaccatacatcaatcaatggaacttactggatgtgatttgcaaccgttttatgaaaagctcaaatctttgagagctattctggagaaatcctgcaatataatgggcgatcatgaggggttaacaatcttggaagttgaaatcgtagaggtagcatacacaacagaagatatggttgactcggaatcaagaaatgtttttttagcacagaatttggaggaaagaagcagggctatgtgggagatttttttcgtcctggaacaagcactagaatgcattgattccaccgtgaaacagtggatggcaacatcggacagcatgaaagatctaaaaccacaaactagctcgcttgtcagtttacctgaacatgatgttgagcagcccgagaatataatggttggccgtgaaaatgaatttgagatgatgctggatcaacttgctagaggaggaagggaactagaagttgtctcaatcgtagggatgggaggcatcgggaaaacaactttggctacaaaactctatagtgatccgtgcattatgtctcgatttgatattcgtgcaaaagcaactgtttcacaagagtattgtgtgagaaatgtactcctaggccttctttctttgacaagtgatgaacctgatgatcagctagcggaccgactgcaaaagcatctgaaaggcaggagatacttggtagtcattgatgacatatggactacagaagcttgggatgatataaaactatgtttcccagactgttataatggaagcagaatactcctgactactcggaatgtggaagtggctgaatatgctagttcaggtaagcctcctcatcacatgcgcctcatgaattttgacgaaagttggaatttactacacaaaaagatctttgaaaaagaaggttcttattctcctgaatttgaaaatattgggaaacaaattgcattaaaatgtggaggattacctctagcaattactgtgattgctggacttctctccaaaatgggtcaaagattagatgagtggcaaagaattggggaaaatgtaagttcggtcgttagcacagatcctgaagcacaatgcatgagagtgttggctttgagttaccatcacttgccttctcacctaaaaccgtgttttctgtattttgcaattttcacagaggatgaacagatttctgtaaatgaacttgttgagttatggcctgtagagggatttttgaatgaagaagagggaaaaagcatagaagaggtggcaacaacatgtataaacgaacttatagatagaagcttaattttcatccacaattttagttttcgtggaacaatagaaagttgtggaatgcatgatgtgacccgtgaactctgtttgagggaagctcgaaacatgaattttgtgaatgttatcagaggaaagagtgatcaaaattcatgtgcacaatccatgcagcgttcctttaagagtcgaagtcggatcagaatccataaggtggaagaattggcttggtgtcgtaacagtgaggctcattctattatcatgttgggtggattcgaatgcgtcacactggaattgtctttcaagctagtaagagtactagatcttggtttgaatacatggccaatttttcccagtggagtactttctctaattcatttgagatacctatctttgcgttttaatccttgcttacagcagtatcaaggatcgaaagaagctgttccctcatcaataatagacattcctctatcgatatcaagcctatgctatctgcaaacttttaaacttaaccttccatttcccagttattatcctttcatattaccatcggaaattttgacgatgccacaattgaggacgctgtgtatgggctggaattacttgcggagtcatgagcctacagagaacagattggttttgaaaaatttgcaatgcctcaatcaattgaaccctcggtattgtacagggtctttttttagactatttcccaatttaaagaagttgcaagtatttggcgtcccagaagactttcgcaatagccaggacctgtatgattttcgctacttatatcagctcgaagaattgacatttcgtttatattatccatatgctgcttgctttctaaaaaacactgcaccttcaggttctacgcaagatcctctgaggtttcagacggaaatattgcacaaagagattgatttcgggggaactgcacctccaactttactcttacctcctccggatgcttttccacaaaaccttaagagtttaacttttaggggagaattctctgtggcatggaaggatttgagcattgttggtaaattacccaaactcgaggtccttatactatcatggaatgccttcataggcaaggagtgggaagtagttgaggaagggtttcctcacttgaagttcttgtttctggatgatgtatacattcgatactggagagctagtagtgatcactttccgtaccttgaacgagttattcttagagattgccgtaatttggattcaatccctcgagattttgcagatataaccacactagctcttattgatatagattactgtcaacaatctgttgtgaattccgccaagcaaattcaacaggacattcaagacaactatggaagctctatcgaggtccatactcgtcatcttttgtaagacatcttcttccttgctttacaacaataattaactcatcatcatagtaaactcgataataatctggataatagccttagtaagtcaaattgcaccaattcaacaaaagttcttgatgctgtcattgtgtttgatttgaatccttccaatattgtgtaacttgttatacttgcatgttcattcttgattttgggaagtgtaacatttcatttttcatcttttgtggctagcattcccaagagtgtgacaacagttgaagatgatgatgatagtgtgacaacagatgaagatgatgatgatgatgactttgagaaagaagttgcttcttgccgcaataatgtgtaagttcttatacctgcatgctcattcttgctataatgttctcttgttccttaattatgggacatctgacatattattttccatgttttgcgtcttttatttttctgcagcgag

SEQ ID NO: 706 - DNA, 480 bp, Tobacco mosaic virus
  source 1..480: mol_type = other DNA
atgtcttacagtatcactactccatctcagttcgtgttcttgtcatcagcgtgggccgacccaatagagttaattaatttatgtactaatgccttaggaaatcagtttcaaacacaacaagctcgaactgtcgttcaaagacaattcagtgaggtgtggaaaccttcaccacaagtaactgttaggttccctgacagtgactttaaggtgtacaggtacaatgcggtattagacccgctagtcacagcactgttaggtgcattcgacactagaaatagaataatagaagttgaaaatcaggcgaaccccacgactgccgaaacgttagatgctactcgtagagtagacgacgcaacggtggccataaggagcgcgataaataatttaatagtagaattgatcagaggaaccggatcttataatcggagctctttcgagagctcttctggtttggtttggacctctggtcctgcaacttga

SEQ ID NO: 707 - DNA, 795 bp, Soybean mosaic virus
  source 1..795: mol_type = other DNA
tcaggcaaggagaaggaaggagacatggatgcaggtaaggatccaaagaagaataccagcagtagcaaaggagctggtacaagcagcaaagatgtaaatgttggatcaaaaggaaaggtggttccgcgtttgcagaagattacaaggaagatgaatcttccaatggttgaagggaagatcattcttagcttggaccacttgcttgagtacaaacctaatcaggttgatttattcaatactcgagcaacaagaacacagtttgaagcgtggtacaatgcagttaaagatgaatatgagcttgatgatgagcagatgggtgtggtcatgaatggtttcatggtttggtgtattgacaatggcacttctccagatgccaatggcgtgtgggtgatgatggatggagaggaacagattgaatatccgctgaagccaattgtcgaaaatgcaaaaccaactttgagacaaatcatgcatcatttttcagatgcagcagaagcttacattgagatgagaaattctgaaagtccgtatatgcctagatatggactgttaaggaatttgagagatagagagctagcccgctatgcttttgacttctatgaggtcacttctaaaacaccaaacagggcaagggaagcaatagcgcaaatgaaggctgcagctctctcgggagttaacaacaagttgtttggacttgatggaaatatctcaaccaactccgaaaatactgaaaggcacactgcaagggatgtgaatcaaaacatgcacactcttctgggcatgggcccaccgcag

SEQ ID NO: 708 - DNA, 654 bp, Cucumber mosaic virus
  source 1..654: mol_type = other DNA
atggacaaatctgaatcaaccagtgccggtcgtaatcgtcgacgtcgtctgcgtcgcggttcccgctccgcctcctcctccgcggatgctacatttagagtcctgtcgcaacagctttcgcgacttaataagacgttagcagctggtcgtcctactattaaccacccaacctttgtgggtagtgagcgttgtaaacctggatacacgttcacctcgattaccctgaagccaccgaaaatagacaaggggtcttattatggcaaaaggttgttacttcctgattcagtcactgagttcgataagaagcttgtttcgcgcattcaaattcgagttaatcctttgccgaaatttgattctaccgtgtgggtgacggtccgtaaagttcctgcctcctcggacctgtctgtatccgccatctctgctatgtttgcggacggagcctcaccggtactggtttatcagtatgctgcatctggcgttcaagccaataacaaattgttatatgatctttcagtgatgcgcgctgatattggtgacatgagaaagtacgccgtgctcgtgtattcaaaagacgatgcgcttgagacggacgaactagtacttcatatcgacatcgagcaccaacgcattcccacgtctggggtgctcccagtt

SEQ ID NO: 709 - DNA, 708 bp, Potato virus X
  source 1..708: mol_type = other DNA
atgactacaccagccaacaccactcaagctgtaggatccaccaaatcaactaccaccaccactgcaggcgcaactcctgccaattcagggctattcaccataccagatggggacttcttcagcaccgcaaaggctgtggtcgctagcaatgccgtggccaccaacgaggatctcgccaaaatacaggaaatctggaaggacaagaaaattccttcagacactatggctcaggcagcttgggacttagtgagacactgtgccgacgtcgggtcctctgcccaaactgaaatgataggcaccggtccatactccaatggggtcagccgggctagactggcagctgcaattaaagaggtgtgcacactgaggcagttctgcaaaaagtatgcccccgtggtctggaactggatgctcacaaacaacagcccaccggccaactggcaggcacaaggcttcaagccggagcacaaattcgcagcctttgacttctttgatggagtcactaatcccgcagctatcactcccaaagaggggctcatgagacctccgtctgaagcagaaatgaatgccgcccaaactgctgcctttgtgaagatcaccaaggcgagggcgcaatccaacgactttgccagtctggatgccgcggtcactaggggccgcatcacaggaacgactgttgcagaagcagttgtttcactacccccacca

SEQ ID NO: 710 - DNA, 774 bp, Tomato spotted wilt virus
  source 1..774: mol_type = other DNA
atgtctaaggttaagctcactaaggaaagcattgttgctttgttgacacaaggcaaagaccttgagtttgaggaagatcagaatctggtagcattcaacttcaagactttttgtctggaaaacatcgaccagatcaagaagatgagcgttatttcatgtctgacattcctaaagaatcgtcagagcataatgaaggttattaagcaaagcgattttacttttggtaaaattaccataaagaaaacttcagacaggattggaggcactgacatgaccttcagaaggcttgatagcttgatcagggtcaggcttgttgaagaaactgggaattctgagaatctcaatactatcaaatctaagattgcttcccatcctttgattcaagcctatggattacctctcgatgatgcaaagtctgtgagacttgccataatgctgggaggtagcttacctcttattgcttcagttgatagctttgagatgatcagtgttgtcttggctatatatcaggatgcaaaatacaaggacctcgggatcgacccaaagaagtatgacaccaaggaagccttaggaaaagtttgcactgtgctgaaaagcaaagcatttgaaatgaatgaagatcaggtgaagaaggggaaagagtatgctgctatacttagctccagcaatcctaatgctaaagggagtgttgctatggaacattacagtgaaactcttaacaagttctatgaaatgttcggggttaaaaagcaggcaaaactcgcagaacttgct

SEQ ID NO: 711 - DNA, 777 bp, Glycine max
  source 1..777: mol_type = other DNA
atgagtggtagcaacgatggtagcggcagctggagctctaggtttttgaaggtggctagtgcagctgccgctacagccgccgttgccggcggtttatatgccattctttcatcctcaacctctgctagctctgagatggaagtgccgtttggcagcgcacggcctgagagcaacactaagcgacaacaagagtcattctatgagcacgaagaaactgaggatgacgaagaatctgaggaggcagacaatgggaaatggaagaaacctgagagtggttgggtgaagctgaatgtggatggttcacgtattcatgaagaacccgcctctgcgggttgtggtggggttataagggacgaatggggaacatggtgcgtgggctttgatcagaaattggaccccaacatttgtcgacaagcccattatacagagttacaagctattctaacgggcctgaaggtggctcgggaggacatgatcaatgtggaaaaactggttgtggagtcagacagtgagcccgcggtgaacatggtgaagagtgggcttgggtacaagtatcatcgtccagagtataaggttgttcaagacataaataggcttcttaaagatcctaagtggctagcgaggttggattatgttcctaggaaagctaatcgagtcgctaattacctcgccaagcgtgtttgtaaaccgtcttctcctcatgatcatcatcatttcagcaagtatccttgtcccccggattacgattgtgaaaagattttcttggaggataacaat

SEQ ID NO: 712 - protein, 361 aa, Arabidopsis thaliana
MATGQVLFQRFYCKKSLAKFDVKIVAASCVWLASKLEENPKKARQVIIVFHRMECRRENLPLEHLDMYAKKFSELKVELSRTERHILKEMGFVCHVEHPHKFISNYLATLETPPELRQEAWNLANDSLRTTLCVRFRSEVVACGVVYAAARRFQVPLPENPPWWKAFDADKSSIDEVCRVLAHLYSLPKAQYISVCKDGKPFTFSSRSGNSQGQSATKDLLPGAGEAVDTKCTAGSANNDLKDGMVTTPHEKATDSKKSGTESNSQPIVGDSSYERSKVGDRERESDREKERGRERDRGRSHRGRDSDRDSDRERDKLKDRSHHRSRDRLKDSGGHSDKSRHHSSRDRDYRDSSKDRRRHH

SEQ ID NO: 713 - protein, 1246 aa, Solanum peruvianum
MAENEIEEMLEHLRRIKSGGDLDWLDILRIEELEMVLRVFRTFTKYNDVLLPDSLVELTKRAKLIGEILHRLFGRIPHKCKTNLNLERLESHLLEFFQGNTASLSHNYELNNFDLSKYMDCLENFLNDVLMMFLQKDRFFHSREQLAKHRSIKELKIVQKKIRFLKYIYAPEINGYVDYEKQECLENRIQFMTNTVGQYCLAVLDYVTEGKLNEENDNFSKPPYLLSLIVLVELEMKKIFHGEVKASKFTQSKTFKDKKLPKGFSHHLHNLLMYLRNKKLENFPNNIAAQNIDVAIEFLLVFLDADVSNHVINGNWLKEVLLKVGAIAGDILYVIQKLLPRSINKDETSNISLCSIQILEKTKDLKAQVETYYKSLKFTPSQFPTFGGLSFLNSLLRKLNEMSTSKSGLGFLMKPLLGNLEKELSSLTSILEKELSSIFRDVVHHEHNIPKDLQRRTINLSYEAEVAIDSILAQYNAFLHIFCSLPTIVKEIKQINAEVTEMWSADIPLNPHYVAAPLKHLPDRHSNLVTDEEVVGFENKAEELIDYLIRGTNELDVVPIVGMGGQGKTTIARKLYNNDIIVSRFDVRAWCIISQTYNRRELLQDIFSQVTGSDDNGATVDVLADMLRRKLMGKRYLIVLDDMWDCMVWDDLRLSFPDDGIRSRIVVTTRLEEVGKQVKYHTDPYSLPFLTTEESCQLLQKKVFQKEDCPPELQDVSQAVAEKCKGLPLVVVLVAGIIKKRKMEESWWNEVKDALFDYLDSEFEEYSLATMQLSFDNLPHCLKPCLLYMGMFSEDARIPASTLISLWIAEGFVENTESGRLMEEEAEGYLMDLISSNLVMLSKRTYKGRVKYCQVHDVVHHFCLEKSREAKFMLAVKGQYIHFQPSDWKGTRVSFSFSEELSKFASLVSKTQKPFHQHLRSLITTNRAKSINDIFSCQISELRLLKVLDLSSYIVEFLSLATFKPLNQLKYLAVQAFEFYFDPGSHLPHIETFIVMNLPYYDILLPVSFWEMKKLRHAHFGKAEFDKQGLSEGSSKLENLRILKNIVGFDRVDVLSRRCPNLQQLQITYFGNNEEPFCPKLENLTQLQQLQLSFARPRTLSGLQLPSNLNKLVLEGIHIGCVIPFIAGLPSLEYLQLHDVCFPQSEEWCLGDITFHKLKLLKLVKLNISRWDVSEESFPLLETLVIKKCIDLEEIPLSFADIPTLEQIKLIGSWKVSLEDSAVRMKEEIKDTEGCDRLHLVKQRSD

SEQ ID NO: 714 - protein, 861 aa, Solanum lycopersicum
MAEILLTSVINKSVEIAGNLLIQEGKRLYWLKEDIDWLQREMRHIRSYVDNAKAKEAGGDSRVKNLLKDIQELAGDVEDLLDDFLPKIQQSNKFNYCLKRSSFADEFAMEIEKIKRRVVDIDRIRKTYNIIDTDNNNDDCVLLDRRRLFLHADETEIIGLDDDFNMLQAKLLNQDLHYGVVSIVGMPGLGKTTLAKKLYRLIRDQFECSGLVYVSQQPRASEILLDIAKQIGLTEQKMKENLEDNLRSLLKIKRYVILLDDIWDVEIWDDLKLVLPECDSKVGSRMIITSRNSNVGRYIGGESSLHALQPLESEKSFELFTKKIFNFDDNNSWANASPDLVNIGRNIVGRCGGIPLAIVVTAGMLRARERTEHAWNRVLESMGHKVQDGCAKVLALSYNDLPIASRPCFLYFGLYPEDHEIRAFDLINMWIAEKFIVVNSGNRREAEDLAEDVLNDLVSRNLIQLAKRTYNGRISSCRIHDLLHSLCVDLAKESNFFHTAHDAFGDPGNVARLRRITFYSDNVMIEFFRSNPKLEKLRVLFCFAKDPSIFSHMAYFDFKLLHTLVVVMSQSFQAYVTIPSKFGNMTCLRYLRLEGNICGKLPNSIVKLTRLETIDIDRRSLIQPPSGVWESKHLRHLCYRDYGQACNSCFSISSFYPNIYSLHPNNLQTLMWIPDKFFEPRLLHRLINLRKLGILGVSNSTVKMLSIFSPVLKALEVLKLSFSSDPSEQIKLSSYPHIAKLHLNVNRTMALNSQSFPPNLIKLTLAYFSVDRYILAVLKTFPKLRKLKMFICKYNEEKMDLSGEANGYSFPQLEVLHIHSPNGLSEVTCTDDVSMPKLKKLLLTGFHCRISLSERLKKLSK

SEQ ID NO: 715 - protein, 937 aa, Solanum tuberosum
MAYAAVTSLMRTIHQSMELTGCDLQPFYEKLKSLRAILEKSCNIMGDHEGLTILEVEIVEVAYTTEDMVDSESRNVFLAQNLEERSRAMWEIFFVLEQALECIDSTVKQWMATSDSMKDLKPQTSSLVSLPEHDVEQPENIMVGRENEFEMMLDQLARGGRELEVVSIVGMGGIGKTTLATKLYSDPCIMSRFDIRAKATVSQEYCVRNVLLGLLSLTSDEPDDQLADRLQKHLKGRRYLVVIDDIWTTEAWDDIKLCFPDCYNGSRILLTTRNVEVAEYASSGKPPHHMRLMNFDESWNLLHKKIFEKEGSYSPEFENIGKQIALKCGGLPLAITVIAGLLSKMGQRLDEWQRIGENVSSVVSTDPEAQCMRVLALSYHHLPSHLKPCFLYFAIFTEDEQISVNELVELWPVEGFLNEEEGKSIEEVATTCINELIDRSLIFIHNFSFRGTIESCGMHDVTRELCLREARNMNFVNVIRGKSDQNSCAQSMQRSFKSRSRIRIHKVEELAWCRNSEAHSIIMLGGFECVTLELSFKLVRVLDLGLNTWPIFPSGVLSLIHLRYLSLRFNPCLQQYQGSKEAVPSSIIDIPLSISSLCYLQTFKLNLPFPSYYPFILPSEILTMPQLRTLCMGWNYLRSHEPTENRLVLKNLQCLNQLNPRYCTGSFFRLFPNLKKLQVFGVPEDFRNSQDLYDFRYLYQLEELTFRLYYPYAACFLKNTAPSGSTQDPLRFQTEILHKEIDFGGTAPPTLLLPPPDAFPQNLKSLTFRGEFSVAWKDLSIVGKLPKLEVLILSWNAFIGKEWEVVEEGFPHLKFLFLDDVYIRYWRASSDHFPYLERVILRDCRNLDSIPRDFADITTLALIDIDYCQQSVVNSAKQIQQDIQDNYGSSIEVHTRHLFIPKSVTTVEDDDDSVTTDEDDDDDDFEKEVASCRNNVE

SEQ ID NO: 716 - protein, 159 aa, Tobacco mosaic virus; identical to SEQ ID NO: 26

SEQ ID NO: 717 - protein, 265 aa, Soybean mosaic virus
SGKEKEGDMDAGKDPKKNTSSSKGAGTSSKDVNVGSKGKVVPRLQKITRKMNLPMVEGKIILSLDHLLEYKPNQVDLFNTRATRTQFEAWYNAVKDEYELDDEQMGVVMNGFMVWCIDNGTSPDANGVWVMMDGEEQIEYPLKPIVENAKPTLRQIMHHFSDAAEAYIEMRNSESPYMPRYGLLRNLRDRELARYAFDFYEVTSKTPNRAREAIAQMKAAALSGVNNKLFGLDGNISTNSENTERHTARDVNQNMHTLLGMGPPQ

SEQ ID NO: 718 - protein, 218 aa, Cucumber mosaic virus
MDKSESTSAGRNRRRRLRRGSRSASSSADATFRVLSQQLSRLNKTLAAGRPTINHPTFVGSERCKPGYTFTSITLKPPKIDKGSYYGKRLLLPDSVTEFDKKLVSRIQIRVNPLPKFDSTVWVTVRKVPASSDLSVSAISAMFADGASPVLVYQYAASGVQANNKLLYDLSVMRADIGDMRKYAVLVYSKDDALETDELVLHIDIEHQRIPTSGVLPV

SEQ ID NO: 719 - protein, 236 aa, Potato virus X
MTTPANTTQAVGSTKSTTTTTAGATPANSGLFTIPDGDFFSTAKAVVASNAVATNEDLAKIQEIWKDKKIPSDTMAQAAWDLVRHCADVGSSAQTEMIGTGPYSNGVSRARLAAAIKEVCTLRQFCKKYAPVVWNWMLTNNSPPANWQAQGFKPEHKFAAFDFFDGVTNPAAITPKEGLMRPPSEAEMNAAQTAAFVKITKARAQSNDFASLDAAVTRGRITGTTVAEAVVSLPPP

SEQ ID NO: 720 - protein, 258 aa, Tomato spotted wilt virus
MSKVKLTKESIVALLTQGKDLEFEEDQNLVAFNFKTFCLENIDQIKKMSVISCLTFLKNRQSIMKVIKQSDFTFGKITIKKTSDRIGGTDMTFRRLDSLIRVRLVEETGNSENLNTIKSKIASHPLIQAYGLPLDDAKSVRLAIMLGGSLPLIASVDSFEMISVVLAIYQDAKYKDLGIDPKKYDTKEALGKVCTVLKSKAFEMNEDQVKKGKEYAAILSSSNPNAKGSVAMEHYSETLNKFYEMFGVKKQAKLAELA

SEQ ID NO: 721 - protein, 259 aa, Glycine max
MSGSNDGSGSWSSRFLKVASAAAATAAVAGGLYAILSSSTSASSEMEVPFGSARPESNTKRQQESFYEHEETEDDEESEEADNGKWKKPESGWVKLNVDGSRIHEEPASAGCGGVIRDEWGTWCVGFDQKLDPNICRQAHYTELQAILTGLKVAREDMINVEKLVVESDSEPAVNMVKSGLGYKYHRPEYKVVQDINRLLKDPKWLARLDYVPRKANRVANYLAKRVCKPSSPHDHHHFSKYPCPPDYDCEKIFLEDNN

SEQ ID NO: 722 - DNA, 3774 bp, Solanum lycopersicum
  source 1..3774: mol_type = other DNA
atggaaaaacgaaaagatattgaagaagcaaacaactcattggtgttattttctgctcttagcaaggacattgccaatgttctaattttcctagagaatgaggaaaatcaaaaagctcttgacaaagatcaagttgaaaagctaaaattgaaaatggcatttatttgtacatatgttcagctttcttattccgattttgagcagtttgaagatataatgactagaaatagacaagaggttgagaatctgcttcaatcacttttggatgatgatgtccttactagcctcaccagtaatatggatgactgtatcagcttgtatcatcgttcttataaatcagatgccatcatgatggatgagcaattggacttcctcctcttgaatctgtatcatctatccaagcatcacgctgaaaagatatttcctggagtgactcaatatgaagttcttcagaatgtatgtggcaacataagagatttccatgggttgatactgaatggttgcattaagcatgagatggttgagaatgtcttacctctgtttcaactcatggctgaaagagtaggacacttcctttgggaggatcagactgatgaagactctcggctctccgagctagatgaggatgaacacaatgatagagactctcgactcttccagctaacacatctactcttgaagattgttccaactgaactggaggttatgcacatatgttatacaaatttgaaagcttcaacttcagcagaagttggacgcttcattaagaagctcctggaaacctcaccggatattctcagagaatatatcattcaactacaagagcatatgttaactgttattccccctagcactttaggggctcgaaacattcatgtcatgatggaattcctattacttattctttctgatatgcccaaggactttattcatcatgacaaactttttgatctcttggctcatgttggaacacttaccagggaggtatcgactcttgtacgtgacttggaagagaaattaaggaataaagagggtaataaccaaacaaattgtgcaaccctagacttgctggaaaatattgaactcctcaagaaagatctcaaacatgtttatctgaaagccccaaattcatctcaatgttgcttccccatgagtgatggaccactcttcatgcatcttctacacatgcacttaaatgatttgctagattctaatgcttattcaatttctttgataaaggaagaaatcgagttggtgagtcaagaactggaattcataagatcattctttggggatgctgctgagcaaggattgtataaagatatctgggcacgtgttctagatgtggcttatgaggcaaaagatgtcatagattcaattattgttcgagataatggtctcttacatcttattttctcacttcccattaccataaagaagatcaaacttatcaaagaagagatctctgctttagatgagaacattcccaaggacagaggtctaatcgttgtgaactctcccaagaaaccagttgagagaaagtcattgacaactgataaaataattgtaggttttgaggaggagacaaacttgatacttagaaagctcaccagtggacccgcagatttagatgtcatttcgatcaccggtatgccgggttcaggtaaaactactttggcatacaaagtatacaatgataagtcagtttctagacattttgaccttcgtgcatggtgcacggtcgatcaaggatatgacgacaagaagttgttggatacaattttcagtcaagttagtggctcagattcaaatttgagtgagaatattgatgttgctgataaattgcggaaacaactgtttggaaagaggtatcttattgtcttagatgatgtgtgggatactactacattggatgagttgacaagaccttttcctgaagctaagaaaggaagtaggattattttgacaactcgagaaaaggaagtggctttgcatggaaagctgaacactgatcctcttgaccttcgattgctaagaccagatgaaagttgggaacttttagataaaaggacatttggtaatgagagttgccctgatgaactattagatgtcggtaaagaaatagccgaaaattgtaaagggcttcctttggtggctgatctgattgctggagtcattgctgggagggaaaagaaaaggagtgtgtggcttgaagttcaaagtagtttgagttcttttattttgaacagtgaagtggaagtgatgaaagttatagaattaagttatgaccatttaccacatcacctcaagccatgcttgcttcactttgcaagttggccgaaggacactcctttgacaatctatttgtttactgtttatttgggtgctgaaggatttgtggaaaagacggagatgaagggtatagaagaagtggtgaagatttatatggatgatttaatttccagtagcttggtaatttgtttcaatgagataggtgatatactgaatttccaaattcatgatcttgtgcatgacttttgtttgataaaagcaagaaaggaaaatttgtttgatcggataagatcaagtgctccatcagatttgttgcctcgtcaaattaccattgattatgatgaggaggaggagcactttgggcttaattttgtcatgttcgattcaaataagaaaaggcattctggtaaacacctctattctttgaggataaatggagaccagctggatgacagtgtttctgatgcatttcacctaagacacttgaggcttattagagtgttggacctggaaccctctttaatcatggtgaatgattctttgctgaatgaaatatgcatgttgaatcatttgaggtacttaagaattcggacacaagttaaatatctgcctttctctttctcaaacctctggaatctagaaagtctgtttgtgtctaacaaaggatcaatcttggtactattaccgagaattttggatcttgtaaagttgcgagtgctgtccgtgggtgcttgttctttctttgatatggatgcagatgaatcaatattgatagcaaaggacacaaagttagagaacttgagaatattaggggaactgttgatttcctattcgaaagatacaatgaatattttcaaaaggtttcccaatcttcaggtgcttcagtttgaactcaaggagtcatgggattattcaacagagcaacattggttcccgaaattggattgcctaactgaactagaaacactctgtgtaggttttaaaagttcaaacacaaaccactgtgggtcctctgttgtgacaaatcggccgtgggattttcacttcccttcaaatttgaaagaactgttgttgtatgactttcctctgacatccgattcactatcaacaatagcgagactgcccaaccttgaaaatttgtccctttatgatacaatcatccagggagaagaatggaacatgggggaggaagacacttttgagaatctcaaatttttgaacttgcgtctactgactctttccaagtgggaggttggagaggaatccttccccaatcttgagaaattaaaactgcaggaatgtggtaagcttgaggagattccacctagttttggagatatttattcattgaaatttatcaaaattgtaaagagtcctcaacttgaagattctgctctcaagattaagaaatacgctgaagatatgagaggagggaacgatcttcagatccttggccagaagaatatccccttatttaagtag

SEQ ID NO: 723 - DNA, 2739 bp, Glycine max
  source 1..2739: mol_type = other DNA
atggcttatgctgctgttacttcccttatgagaaccatacatcaatcaatggaacttactggatgtgatttgcaaccgttttatgaaaagctcaaatctttgagagctattctggagaaatcctgcaatataatgggcgatcatgaggggttaacaatcttggaagttgaaatcatagaggtagcatacacaacagaagatatggttgactcggaatcaagaaatgtttttttagcacggaatgtggggaaaagaagcagggctatgtgggggatttttttcgtcttggaacaagcactagaatgcattgattccaccgtgaaacagtggatggcaacatcggacagcatgaaagatctaaaaccacaaactagctcacttgtcagtttacctgaacatgatgttgagcagcccgagaatataatggttggccgtgaaaatgaatttgagatgatgctggatcaacttgctagaggaggaagggaactagaagttgtctcaatcgtagggatgggaggcatcgggaaaacaactttggctgcaaaactctatagtgatccttacattatgtctcgatttgatattcgtgcaaaagcaactgtttcacaagagtattgtgtgagaaatgtactcctaggccttctttctttgacaagtgatgaacctgattatcagctagcggaccaactgcaaaagcatctgaaaggcaggagatacttggtagtcattgatgacatatggactacagaagcttgggatgatataaaactatgtttcccagactgcgataatggaagcagaatactcctgactactcggaatgtggaagtggctgaatatgctagctcaggtaagcctcctcatcacatgcgcctcatgaattttgacgaaagttggaatttactacacaaaaagatctttgaaaaagaaggttcttattctcctgaatttgaaaatattgggaaacaaattgcattaaaatgtggagggttacctctagcaattactttgattgctggacttctctccaaaatcagtaaaacattggatgagtggcaaaatgttgcggagaatgtacgttcggtggtaagcacagatcttgaagcaaaatgcatgagagtgttggctttgagttaccatcacttgccttctcacctaaaaccgtgttttctgtattttgcaattttcgcagaggatgaacggatttatgtaaataaacttgttgagttatgggccgtagaggggtttttgaatgaagaagagggaaaaagcatagaagaggtggcagaaacatgtataaacgaacttgtagatagaagtctaatttctatccacaatgtgagttttgatggggaaacacagagatgtggaatgcatgatgtgacccgtgaactctgtttgagggaagctcgaaacatgaattttgtgaatgttatcagaggaaagagtgatcaaaattcatgtgcacaatccatgcagtgttcctttaagagtcgaagtcggatcagtatccataatgaggaagaattggtttggtgtcgtaacagcgaggctcattctatcatcacgttgtgtatattcaaatgcgtcacactggaattgtctttcaagctagtaagagtactagatcttggtttgactacatgcccaatttttcccagtggagtactttctctaattcatttgagatacctatctttgcgttttaatcctcgcttacagcagtatcgaggatcgaaagaagctgttccctcatcaataatagacattcctctatcgatatcaagcctatgctatctgcaaacttttaaactttaccatccatttcccaattgttatcctttcatattaccatcggaaattttgacaatgccacaattgaggaagctgtgtatgggctggaattacttgcggagtcatgagcctacagagaacagattggttttgaaaagtttgcaatgcctcaatgaattgaatcctcggtattgtacagggtcttttttaagactatttcccaatttaaagaagttggaagtatttggcgtcaaagaggactttcgcaatcacaaggacctgtatgattttcgctacttatatcagctcgagaaattggcatttagtacttattattcatcttctgcttgctttctaaaaaacactgcacctttaggttctactccgcaagatcctctgaggtttcagatggaaacattgcacttagagactcattccagggcaactgcacctccaactgatgttccaactttcctcttacctcctccggattgttttccacaaaaccttaagagtttaacttttagcggagatttctttttggcatggaaggatttgagcattgttggtaaattacccaaactcgaggtccttcaactatcacacaatgccttcaaaggcgaggagtgggaagtagttgaggaagggtttcctcacttgaagttcttgtttctggatagcatatacattcggtactggagagctagtagtgatcactttccataccttgaacgactttttcttagcgattgcttttatttggattcaatccctcgagattttgcagatataaccacactagctcttattgatatatttcgctgccaacaatctgttgggaattccgccaagcaaattcaacaggacattcaagacaactatggaagctctatcgaggtccatactcgttatctttatcgaaatggagcatttttggtagtgtga

SEQ ID NO: 724 - DNA, 2565 bp, Glycine max
  source 1..2565: mol_type = other DNA
atggtagtagcagtggagaaaaccaacctcacttcacaatcacaatgcttcaaccgtgtttctgacaagaagaaagaaagatgcaagacacacatgaacaacgttaacccatgttgttttttgtttctcttatgtgtgtggagccttgttgtgctcccctcatgcgtgaggccagttttgtgtgaagatgaaggttgggatggagtggttgtgacagcatcaaacctcttagcacttgaagctttcaagcaagagttggttgatccagaagggttcttgcggagctggaatgacagtggctatggagcttgttccggaggttgggttggaatcaagtgtgctaagggacaggttattgtgatccagcttccttggaagggtttgaggggtcgaatcaccgacaaaattggtcaacttcaaggcctcaggaagcttagtcttcatgataaccaaattggtggttcaatcccttcaactttgggacttcttcccaaccttagaggggttcagttattcaacaataggcttacaggttccatacctctttctttaggtttctgccctttgcttcagtctcttgacctcagcaacaacttgctcacaggagcaatcccttatagtcttgctaattccactaagctttattggcttaacttgagtttcaactccttctctggtcctttaccagctagcctaactcactcattttctctcacttttctttctcttcaaaataacaatctttctggctcccttcctaactcttggggtgggaattccaagaatggcttctttaggcttcaaaatttgatcctagatcataactttttcactggtgacgttcctgcttctttgggtagcttaagagagctcaatgagatttcccttagtcataataagtttagtggagctataccaaatgaaataggaaccctttctaggcttaagacacttgacatttctaataatgccttgaatgggaacttgcctgctaccctatctaatttatcctcacttacactgctgaatgcagagaacaacctccttgacaatcaaattcctcaaagtttaggtagattgcgtaatctttctgttctgattttgagtagaaaccaatttagtggacatattccttcaagtattgcaaacatttcctcgcttaggcagcttgatttgtcactgaataatttcagtggagaaattccagtctcctttgacagtcagcgcagtctaaatctcttcaatgtttcctacaatagcctctcaggttctgtcccccctctgcttgccaagaaatttaactcaagctcatttgtgggaaatattcaactatgtggatacagcccttcaaccccatgtctttcccaagctccatcacaaggagtcattgccccacctcctgaagtgtcaaaacatcaccatcataggaagctaagcaccaaagacataattctcatagtagcaggagttctcctcgtagtcctgattatactttgttgtgtcctgcttttctgcctgatcagaaagagatcaacatctaaggccgggaacggccaagccaccgagggtagagcggccactatgaggacagaaaaaggagtccctccagttgctggtggtgatgttgaagcaggtggggaggctggagggaaactagtccattttgatggaccaatggcttttacagctgatgatctcttgtgtgcaacagctgagatcatgggaaagagcacctatggaactgtttataaggctattttggaggatggaagtcaagttgcagtaaagagattgagggaaaagatcactaaaggtcatagagaatttgaatcagaagtcagtgttctaggaaaaattagacaccccaatgttttggctctgagagcctattacttgggacccaaaggggaaaagcttctggtttttgattacatgtctaaaggaagtcttgcttctttcctacatggtggtggaactgaaacattcattgattggccaacaagaatgaaaatagcacaagacttggcccgtggcttgttctgccttcattcccaggagaacatcatacatgggaacctcacatccagcaatgtgttgcttgatgagaatacaaatgctaaaattgcagattttggtctttctcggttgatgtcaactgctgctaattccaacgtgatagctacagctggagcattgggataccgggcacctgagctctcaaagctcaagaaagcaaacactaaaactgatatctacagtcttggtgttatcttgttagaactcctaacgaggaaatcacctggggtgtctatgaatggactagatttgcctcagtgggttgcctcagttgtcaaagaggagtggacaaatgaggtttttgatgcagacttgatgagagatgcatccacagttggcgacgagttgctaaacacgttgaagctcgctttgcactgtgttgatccttctccatcagcacgaccagaagttcatcaagttctccagcagctggaagagattagaccagagagatcagtcacagccagtcccggggacgatatcgtatag

SEQ ID NO: 725 - DNA, 2763 bp, Glycine max
  source 1..2763: mol_type = other DNA
atgtctctccccaaaaccctactttctctcttccttctcctcacgatccccctagtaaccgccgatgacgccgcggtgatgtcgaattttctcaaatccctcactccaccgccctcgggctggtctgaaacaaccccattctgccaatggaagggtatccaatgcgattcatccagccacgtgaccagcataagcctcgcttcgcattccctcaccggaacactcccctcggatctcaattccctctctcaactccgcactctctccctccaagacaattccctcaccggcaccctcccttctctctccaacctttctttcctccaaaccgtctacttaaaccgcaacaacttctcctccgtgtcccccaccgctttcgcctccctaacctccctccaaaccctcagcctcggctccaaccctgctctccaaccctggtccttccccaccgacctcacttcctcctctaacctaatcgacctcgacctcgccaccgtatccctcaccggtcccttgccggacattttcgacaaattcccttcccttcaacaccttcgcctctcttacaacaacctcaccggcaatttaccctcctctttctccgccgccaacaatctcgaaacgctctggctcaacaaccaggccgccggcttgtccggtaccctcctcgtcctctccaacatgtctgcattaaaccagtcctggctcaataagaaccagttcaccggttccataccggatttatcgcaatgcacggctttgtctgacttgcagctcagggataaccagttaactggtgtggttcccgcttcattgacaagtcttcctagtttgaagaaagtttctctggataataatgagcttcaggggcctgtgcccgtgtttgggaaaggtgtgaatgttactctcgatgggattaatagtttttgtcttgatactcctgggaattgtgatcccagggtgatggttttgctgcagattgccgaggcattcgggtatccaattcggttggcagagtcgtggaaggggaatgatccgtgtgatggttggaactatgttgtgtgtgctgccggaaagattattactgtcaatttcgagaaacagggtttgcagggtaccatctcccctgcatttgccaatttgactgacttgaggactttgtttctcaatggcaataatttgatcggttctatacctgatagtttgatcactttgcctcagcttcagactcttgatgtgtctgacaacaacctctctggattggttcctaagttcccaccaaaggtgaagttggtgactgcgggaaatgctttgcttgggaaaccccttagtcctggaggtggaccaagtggaactactccttctgggtcttcgaccggtggaagtggtggtgaatcctcaaagggtaattcttcggtgtcgccaggttggattgctggtatagttgttattgtgttgttttttattgcagtggtgttgtttgtgtcttggaagtgttttgtcaacaagctgcaggggaagttcagtagggttaaaggtcatgaaaatgggaaaggaggctttaaacttgatgctgtccatgtttctaatggatatggtggtgttccagttgagttgcaaagccagagcagtggtgatcgcagtgaccttcatgctttagatggtccaacattttctatccaagttcttcgacaagtgacgaataatttcagcgaggagaacattttaggcaggggagggtttggagtagtttataagggggtgttgcatgatggaacaaaaattgctgttaagaggatggaatctgttgcaatggggaacaaaggtcagaaagagttcgaagcagagattgcacttcttagtaaagttaggcatagacatttggttgctcttctagggtattgcatcaatggcaatgaaaggcttttggtgtatgagtatatgcctcaaggtacattaacacagcacctgtttgagtggcaggagcatgggtatgctcctttgacttggaagcaaagggtagtaatagctttggatgtagcgcggggggtggaatacttgcacagtttagctcagcaaagcttcattcatagagacttaaaaccctcaaacatactactaggcgatgacatgagagcaaaggttgctgattttgggttggttaaaaatgcaccagatgggaagtattctgttgagacacggttggctggaacatttggatatcttgcacctgagtatgcagctactggaagagtgacaaccaaagtggatgtttatgcatttggagtagttctgatggaacttatcaccggtagaaaggcattggatgatactgtgccagatgaaaggtctcacttggtgacatggttccgtagggtactaattaacaaggaaaacattccaaaggcaattgatcaaattctcaatccagatgaggaaaccatgggaagcatatatacagtggccgagctggcaggccattgcactgctcgcgaaccataccaaaggccggatatgggtcatgcagtgaacgtcttggttcctcttgtggagcaatggaaacctactagccatgatgaagaagaggaagacggctctggcggtgaccttcatatgagccttcctcaagctctacgaaggtggcaagccaacgaaggcacttcctcaatatttaatgacatttccatctcacaaacccaatcaagcatctcctctaaacctgcagggtttgcagactcctttgattcaatggattgccgttaa

SEQ ID NO: 726 - DNA, 405 bp, Zea mays
  source 1..405: mol_type = other DNA
atgcgcaaacatcgaatcgtctcactcgtggctgccctgctcatactgcttgccctcgccgtatcgtccaaccgcaacgcacaggaggattccatggccgacaacaccgggacgttggtgggcggcatccaggacgtgccggagaacgagaacgaccttcacctccaggagctcgcccgcttcgccgtcgatgagcacaacaagaaggccaatgctcttctggggttcgagaagcttgtgaaggccaagacacaagtggttgctggcacgatgtactatctcactattgaagtgaaggatggcgaagtcaagaagctctacgaagctaaggtctgggagaagccatgggagaagttcaaggagctgcaggaattcaagcctgttgaagagggtgctagcgcctaa

SEQ ID NO: 727 - DNA, 618 bp, Colocasia esculenta
  source 1..618: mol_type = other DNA
atggccttgatggggggcatcgtggatgtggagggagcgcagaacagcgccgaagtagaggagctcgcccgcttcgccgtcgacgaacacaataagaaggagaatgcgcttctgcagttctcccggcttgtgaaggcgaagcaacaggtggtttcgggcattatgcatcacctcactgtggaggttatcgaaggtggcaagaagaaagtgtatgaagccaaggtctgggtccaggcttggcttaactccaagaagcttcatgagttcagccccattggcgattcatcctcggttacgccagcagatctcggtgtaaaacgggatgcgcacgaagcggaatggctagagataccaacacatgatcctgtcgtccaagacgcagcaaaccatgcggtgaagagcatccagcaaagatccaatactttgttcccttatgaactgttggagatccttcatgcaaaggctaaggtgcttgaggacctcgccaaaatccatttgctactcaaacttaagaggggaagcagggaggagaagttcaaggtggaagtgcacaagaacattgaggggactttccatctgaatcagatggagcaagatcattcagactctggaaactag

SEQ ID NO: 728 - DNA, 1434 bp, synthetic construct
  source 1..1434: mol_type = other DNA
atggccatcgatagcaagactactttgcctaggcattcacttatccatacaatcaagctgaactctaacaagaagtatggtcctggtgacatgactaacggaaatcagttcatcatctcaaagcaggagtgggctactatcggagcctacatccagactggacttggattgccagtgaacgagcagcagttgaggacacatgttaacttgtctcaggatatctcaatccctagtgatttctctcagttgtatgacgtttactgttctgataagactagtgcagagtggtggaacaagaacttgtatcctttgatcatcaagtctgctaacgacatcgcttcatacggtttcaaggtggctggtgatccttctatcaagaaggatggatatttcaagaagttgcaggacgagcttgataacatcgttgataacaactctgatgacgacgcaatcgctaaggctatcaaggatttcaaggctagatgtggtatcttgatcaaggaagctaagcagtatgaggaagctgccaagaacatcgtgacatctctcgatcagttcttacatggtgatcagaagaagttagaaggtgttatcaacatccagaagaggttgaaggaagtgcagacagctcttaaccaggctcatggagagtctagtccagctcataaggagctcttggagaaagtgaagaacttgaagacaacattagagaggactatcaaggctgagcaggaccttgagaagaaagtggagtatagcttcttgttaggaccattgttgggattcgtggtttacgagatccttgagaacactgctgttcagcatatcaagaaccagatcgatgagatcaagaagcagttggattctgctcagcatgatttggacagggacgtgaagattatcggaatgttgaacagtatcaacacagatatcgacaacctttactctcaaggacaggaagcaatcaaggttttccagaagttgcaaggaatctgggctactatcggtgctcagatcgagaaccttaggacaacatcattgcaagaggttcaggactctgatgacgctgatgagatccagatcgaactcgaggacgcttctgacgcttggttggttgtggctcaggaggctagggatttcacacttaacgcttactcaactaactctaggcagaaccttccaatcaacgttatctcagattcatgtaactgttcaacaacaaacatgacatcaaaccaatacagcaatccaacaacaaacatgacatcaaaccagtacatgatctcacatgagtacacaagcttgccaaacaacttcatgttgtcaaggaactctaacttggaatacaagtgtcctgagaacaacttcatgatctattggtacaacaactctgactggtacaacaactctgattggtacaacaaccctccataa

SEQ ID NO: 729 - protein, 587 aa, Bacillus thuringiensis
KDQQLFNAIMDAVNKMVDNKFLSYNLSTLNKTIEGLQGNLGLFQNAIQVAICQGSTPERVNFDQNCTPCNPNQPCKDDLDRVASRFDTANSQFTQHLPEFKNPWSDENSTQEFKRTSVELTLPMYTTVATLHLLLYEGYIEFMTKWNFHNEQYLNNLKVELQQLIHSYSETVRTSFLQFLPTLNNRSKSSVNAYNRYVRNMTVNCLDIAATWPTFDTHNYHQGGKLDLTRIILSDTAGPIEEYTTGDKTSGPEHSNITPNNILDTPSPTYQHSFVSVDSIVYSRKELQQLDIATYSTNNSNNCHPYGLRLSYTDGSRYDYGDNQPDFTTSNNNYCHNSYTAPITLVNARHLYNAKGSLQNVESLVVSTVNGGSGSCICDAWINYLRPPQTSKNESRPDQKINVLYPITETVNKGTGGNLGVISAYVPMELVPENVIGDVNADTKLPLTQLKGFPFEKYGSEYNNRGISLVREWINGNNAVKLSNSQSVGIQITNQTKQKYEIRCRYASKGDNNVYFNVDLSENPFRNSISFGSTESSVVGVQGENGKYILKSITTVEIPAGSFYVHITNQGSSDLFLDRIEFVPKIQ

SEQ ID NO: 730 - protein, 1257 aa, Solanum lycopersicum
MEKRKDIEEANNSLVLFSALSKDIANVLIFLENEENQKALDKDQVEKLKLKMAFICTYVQLSYSDFEQFEDIMTRNRQEVENLLQSLLDDDVLTSLTSNMDDCISLYHRSYKSDAIMMDEQLDFLLLNLYHLSKHHAEKIFPGVTQYEVLQNVCGNIRDFHGLILNGCIKHEMVENVLPLFQLMAERVGHFLWEDQTDEDSRLSELDEDEHNDRDSRLFQLTHLLLKIVPTELEVMHICYTNLKASTSAEVGRFIKKLLETSPDILREYIIQLQEHMLTVIPPSTLGARNIHVMMEFLLLILSDMPKDFIHHDKLFDLLAHVGTLTREVSTLVRDLEEKLRNKEGNNQTNCATLDLLENIELLKKDLKHVYLKAPNSSQCCFPMSDGPLFMHLLHMHLNDLLDSNAYSISLIKEEIELVSQELEFIRSFFGDAAEQGLYKDIWARVLDVAYEAKDVIDSIIVRDNGLLHLIFSLPITIKKIKLIKEEISALDENIPKDRGLIVVNSPKKPVERKSLTTDKIIVGFEEETNLILRKLTSGPADLDVISITGMPGSGKTTLAYKVYNDKSVSRHFDLRAWCTVDQGYDDKKLLDTIFSQVSGSDSNLSENIDVADKLRKQLFGKRYLIVLDDVWDTTTLDELTRPFPEAKKGSRIILTTREKEVALHGKLNTDPLDLRLLRPDESWELLDKRTFGNESCPDELLDVGKEIAENCKGLPLVADLIAGVIAGREKKRSVWLEVQSSLSSFILNSEVEVMKVIELSYDHLPHHLKPCLLHFASWPKDTPLTIYLFTVYLGAEGFVEKTEMKGIEEVVKIYMDDLISSSLVICFNEIGDILNFQIHDLVHDFCLIKARKENLFDRIRSSAPSDLLPRQITIDYDEEEEHFGLNFVMFDSNKKRHSGKHLYSLRINGDQLDDSVSDAFHLRHLRLIRVLDLEPSLIMVNDSLLNEICMLNHLRYLRIRTQVKYLPFSFSNLWNLESLFVSNKGSILVLLPRILDLVKLRVLSVGACSFFDMDADESILIAKDTKLENLRILGELLISYSKDTMNIFKRFPNLQVLQFELKESWDYSTEQHWFPKLDCLTELETLCVGFKSSNTNHCGSSVVTNRPWDFHFPSNLKELLLYDFPLTSDSLSTIARLPNLENLSLYDTIIQGEEWNMGEEDTFENLKFLNLRLLTLSKWEVGEESFPNLEKLKLQECGKLEEIPPSFGDIYSLKFIKIVKSPQLEDSALKIKKYAEDMRGGNDLQILGQKNIPLFK

SEQ ID NO: 731 - protein, 912 aa, Glycine max
MAYAAVTSLMRTIHQSMELTGCDLQPFYEKLKSLRAILEKSCNIMGDHEGLTILEVEIIEVAYTTEDMVDSESRNVFLARNVGKRSRAMWGIFFVLEQALECIDSTVKQWMATSDSMKDLKPQTSSLVSLPEHDVEQPENIMVGRENEFEMMLDQLARGGRELEVVSIVGMGGIGKTTLAAKLYSDPYIMSRFDIRAKATVSQEYCVRNVLLGLLSLTSDEPDYQLADQLQKHLKGRRYLVVIDDIWTTEAWDDIKLCFPDCDNGSRILLTTRNVEVAEYASSGKPPHHMRLMNFDESWNLLHKKIFEKEGSYSPEFENIGKQIALKCGGLPLAITLIAGLLSKISKTLDEWQNVAENVRSVVSTDLEAKCMRVLALSYHHLPSHLKPCFLYFAIFAEDERIYVNKLVELWAVEGFLNEEEGKSIEEVAETCINELVDRSLISIHNVSFDGETQRCGMHDVTRELCLREARNMNFVNVIRGKSDQNSCAQSMQCSFKSRSRISIHNEEELVWCRNSEAHSIITLCIFKCVTLELSFKLVRVLDLGLTTCPIFPSGVLSLIHLRYLSLRFNPRLQQYRGSKEAVPSSIIDIPLSISSLCYLQTFKLYHPFPNCYPFILPSEILTMPQLRKLCMGWNYLRSHEPTENRLVLKSLQCLNELNPRYCTGSFLRLFPNLKKLEVFGVKEDFRNHKDLYDFRYLYQLEKLAFSTYYSSSACFLKNTAPLGSTPQDPLRFQMETLHLETHSRATAPPTDVPTFLLPPPDCFPQNLKSLTFSGDFFLAWKDLSIVGKLPKLEVLQLSHNAFKGEEWEVVEEGFPHLKFLFLDSIYIRYWRASSDHFPYLERLFLSDCFYLDSIPRDFADITTLALIDIFRCQQSVGNSAKQIQQDIQDNYGSSIEVHTRYLYRNGAFLVV

SEQ ID NO: 732 - protein, 854 aa, Glycine max
MVVAVEKTNLTSQSQCFNRVSDKKKERCKTHMNNVNPCCFLFLLCVWSLVVLPSCVRPVLCEDEGWDGVVVTASNLLALEAFKQELVDPEGFLRSWNDSGYGACSGGWVGIKCAKGQVIVIQLPWKGLRGRITDKIGQLQGLRKLSLHDNQIGGSIPSTLGLLPNLRGVQLFNNRLTGSIPLSLGFCPLLQSLDLSNNLLTGAIPYSLANSTKLYWLNLSFNSFSGPLPASLTHSFSLTFLSLQNNNLSGSLPNSWGGNSKNGFFRLQNLILDHNFFTGDVPASLGSLRELNEISLSHNKFSGAIPNEIGTLSRLKTLDISNNALNGNLPATLSNLSSLTLLNAENNLLDNQIPQSLGRLRNLSVLILSRNQFSGHIPSSIANISSLRQLDLSLNNFSGEIPVSFDSQRSLNLFNVSYNSLSGSVPPLLAKKFNSSSFVGNIQLCGYSPSTPCLSQAPSQGVIAPPPEVSKHHHHRKLSTKDIILIVAGVLLVVLIILCCVLLFCLIRKRSTSKAGNGQATEGRAATMRTEKGVPPVAGGDVEAGGEAGGKLVHFDGPMAFTADDLLCATAEIMGKSTYGTVYKAILEDGSQVAVKRLREKITKGHREFESEVSVLGKIRHPNVLALRAYYLGPKGEKLLVFDYMSKGSLASFLHGGGTETFIDWPTRMKIAQDLARGLFCLHSQENIIHGNLTSSNVLLDENTNAKIADFGLSRLMSTAANSNVIATAGALGYRAPELSKLKKANTKTDIYSLGVILLELLTRKSPGVSMNGLDLPQWVASVVKEEWTNEVFDADLMRDASTVGDELLNTLKLALHCVDPSPSARPEVHQVLQQLEEIRPERSVTASPGDDIV

SEQ ID NO: 733 - protein, 920 aa, Glycine max
MSLPKTLLSLFLLLTIPLVTADDAAVMSNFLKSLTPPPSGWSETTPFCQWKGIQCDSSSHVTSISLASHSLTGTLPSDLNSLSQLRTLSLQDNSLTGTLPSLSNLSFLQTVYLNRNNFSSVSPTAFASLTSLQTLSLGSNPALQPWSFPTDLTSSSNLIDLDLATVSLTGPLPDIFDKFPSLQHLRLSYNNLTGNLPSSFSAANNLETLWLNNQAAGLSGTLLVLSNMSALNQSWLNKNQFTGSIPDLSQCTALSDLQLRDNQLTGVVPASLTSLPSLKKVSLDNNELQGPVPVFGKGVNVTLDGINSFCLDTPGNCDPRVMVLLQIAEAFGYPIRLAESWKGNDPCDGWNYVVCAAGKIITVNFEKQGLQGTISPAFANLTDLRTLFLNGNNLIGSIPDSLITLPQLQTLDVSDNNLSGLVPKFPPKVKLVTAGNALLGKPLSPGGGPSGTTPSGSSTGGSGGESSKGNSSVSPGWIAGIVVIVLFFIAVVLFVSWKCFVNKLQGKFSRVKGHENGKGGFKLDAVHVSNGYGGVPVELQSQSSGDRSDLHALDGPTFSIQVLRQVTNNFSEENILGRGGFGVVYKGVLHDGTKIAVKRMESVAMGNKGQKEFEAEIALLSKVRHRHLVALLGYCINGNERLLVYEYMPQGTLTQHLFEWQEHGYAPLTWKQRVVIALDVARGVEYLHSLAQQSFIHRDLKPSNILLGDDMRAKVADFGLVKNAPDGKYSVETRLAGTFGYLAPEYAATGRVTTKVDVYAFGVVLMELITGRKALDDTVPDERSHLVTWFRRVLINKENIPKAIDQILNPDEETMGSIYTVAELAGHCTAREPYQRPDMGHAVNVLVPLVEQWKPTSHDEEEEDGSGGDLHMSLPQALRRWQANEGTSSIFNDISISQTQSSISSKPAGFADSFDSMDCR

SEQ ID NO: 734 - protein, 134 aa, Zea mays
MRKHRIVSLVAALLILLALAVSSNRNAQEDSMADNTGTLVGGIQDVPENENDLHLQELARFAVDEHNKKANALLGFEKLVKAKTQVVAGTMYYLTIEVKDGEVKKLYEAKVWEKPWEKFKELQEFKPVEEGASA

SEQ ID NO: 735 - protein, 205 aa, Colocasia esculenta
MALMGGIVDVEGAQNSAEVEELARFAVDEHNKKENALLQFSRLVKAKQQVVSGIMHHLTVEVIEGGKKKVYEAKVWVQAWLNSKKLHEFSPIGDSSSVTPADLGVKRDAHEAEWLEIPTHDPVVQDAANHAVKSIQQRSNTLFPYELLEILHAKAKVLEDLAKIHLLLKLKRGSREEKFKVEVHKNIEGTFHLNQMEQDHSDSGN

SEQ ID NO: 736 - protein, 475 aa, Bacillus thuringiensis
MIIDSKTTLPRHSLIHTIKLNSNKKYGPGDMTNGNQFIISKQEWATIGAYIQTGLGLPVNEQQLRTHVNLSQDISIPSDFSQLYDVYCSDKTSAEWWNKNLYPLIIKSANDIASYGFKVAGDPSIKKDGYFKKLQDELDNIVDNNSDDDAIAKAIKDFKARCGILIKEAKQYEEAAKNIVTSLDQFLHGDQKKLEGVINIQKRLKEVQTALNQAHGESSPAHKELLEKVKNLKTTLERTIKAEQDLEKKVEYSFLLGPLLGFVVYEILENTAVQHIKNQIDEIKKQLDSAQHDLDRDVKIIGMLNSINTDIDNLYSQGQEAIKVFQKLQGIWATIGAQIENLRTTSLQEVQDSDDADEIQIELEDASDAWLVVAQEARDFTLNAYSTNSRQNLPINVISDSCNCSTTNMTSNQYSNPTTNMTSNQYMISHEYTSLPNNFMLSRNSNLEYKCPESNFMIYWYNNSDWYNNSDWYNN

SEQ ID NO: 737 - DNA, 1000 bp, Pseudomonas syringae
  source 1..1000: mol_type = other DNA
atgaacaagcgctacggcaacaacttgccgggatcctgttgcgcgctgagcaaccggatcgactggacgtcaccttcgcgcagcacgccatctggcaaaaaggccgccgttaatcgtttccaatatttctgcaggagtctgcccgtgaccaccttcaccgtgcccctgattctgtcggatgcaagccccacggcactcgccgctaccgcgcaacgtctgcgcgccgagcacgagacgcgctccttcgccgctgatgactgacatcaccgtgcccttccagctcggaatgcacttcgtcttcccagctttcctgatacggctgacgatacattttgcggaagtgattgcggatcaggttcagcgcgatgccacacagccaggtctgcggtttgctggcatgttgaaacttgtgctcgttacgcagggcttcaagaaacacgcactggagaatgtcatccacatcatcagggttcatcacccgcttttggataaacgccctgcagggcgtttatccaaaagcgggtgatgaaccctgatgatgtggatgacattctccagtgcgtgtttcttgaagccctgcgtaacgagcacaagtttcaacatgccagcaaaccgcagacctggctgtgtggcatcgcgctgaacctgatccgcaatcacttccgcaaaatgtatcgtcagccgtatcaggaaagctgggaagacgaagtgcattccgagctggaagggcacggtgatgtcagtcatcagcggcgaaggagcgcgtctcgtgctcggcgcgcagacgttgcgcggtagcggcgagtgccgtggggcttgcatccgacagaatcaggggcacggtgaaggtggtcacgggcagactcctgcagaaatattggaaacgattaacggcggcctttttgccagatggcgtgctgcgcgaaggtgacgtccagtcgatccggttgctcagcgcgcaacaggatcccggcaagttgttgccgtagcgcttgttcat

SEQ ID NO: 738 - DNA, 1313 bp, Arabidopsis thaliana
  source 1..1313: mol_type = other DNA
atggcctctctattctcttcagttctcttgtctctttgtttactctcttcactttttctctcaaatgcaaacgctaagccaaaactaggcttcaccgcggatctaatccaccgtgattctcctaaatcgccgttctataacccgatggaaacctcttcccagcgtctacgaaacgcgatccaccgatccgttaaccgtgttttccatttcactgaaaaggataacacaccacaaccacagattgacctcacctcaaatagcggtgaatatctcatgaacgtatccattggaacacctcctttcccgatcatggccatcgccgacaccggaagtgatctcctctggacgcagtgcgcaccatgcgatgattgttacactcaagttgatcctctctttgaccctaaaacgtcttccacatacaaagacgtttcttgctcctcaagtcaatgtactgccctagaaaatcaagcctcttgttccacaaatgacaacacttgttcttactcattgtcttacggggataactcatacacaaagggtaacatcgccgtggataccttaacgctcggctccagcgatacccgccctatgcagcttaagaatattattatcggttgtggtcacaacaacgctggaacgtttaacaagaaaggctctggaatcgtcggactaggtggtggtccggtttcgcttatcaagcaacttggcgactccatcgacggtaaattctcatactgcttggttcctctaacttccaaaaaggatcaaacgagtaaaatcaacttcggaaccaatgccatcgtgtcgggatcaggagttgtctcaactcctctgatcgcaaaggcgtctcaagagaccttctattacctaaccctaaaatccattagcgtgggaagcaagcaaatccaatactcaggctcagattctgaaagcagcgagggaaacatcatcatcgattcaggcacaactttaacgttattaccgactgaattttactccgagctcgaggatgcggttgcatcctctatcgatgctgagaagaagcaagatccacaaagcggtttgagtctatgttacagtgcaaccggagatctaaaagttccagtcattactatgcattttgatggagccgatgtgaagcttgactcctccaatgcctttgtacaagtctcggaggatttggtttgctttgccttccgcggaagcccgagtttctccatatacggtaatgtggcgcagatgaactttcttgttggatacgacactgtttccaaaacggtgtcatttagccaacagattgtgcaaagatgtag

SEQ ID NO: 739 - DNA, 1771 bp, Poncirus trifoliata
  source 1..1771: mol_type = other DNA
ttgagaggaatatatattgtagctgttggcgactaatagatgattgttaattattaatgaatcagatattgtgttttgtgttagatttagtgattgatgatcttttcagtgacacagcgacacaaataacatcaaatatgttaatttatagttttataccatatcgattcaaaaccaaatacagtaaaacgaactaatcgttcgtaggatgatacaatcttgcgaaatacaaaatttaattactgcttggtgcagtcagtcggtctaaatgacactgtttgttgttctatgtcatagccgactaaaaagttagtctgcattatattaccataaagttgcagactattggtggtacctttaaaaacagaacatacaatatccttcgaaaccttcacaaaaaagttggaacgactcaatttcacatctgcacctctgaaatgtattgtaacttcaggaacttgagatagtgaattaaaactgtagcaaagttcaaatgatcctttggggtctgcaacaggttgtgcctcaatcatactggacattactgacaacaattttgagttataaccttgtggcaataaggtaaatgttgtaccagaatcgattacaatgtctcttcctggagtcgatccagacataacttctagtctttggtttcctacactgattgcatcaattgtgagaacataagaggttttggctttagtcaagggagtagaaaccactcctgggcctgaaacaattccattggttccaaaattgattttggttgaggttgctggaaccaaacaataggagaatttaccagcaattgtagttcgcatttgagaaataagtgaaatatcgccgcctccaaggccaacaattccggttgtttttgaattaaacaagccaccattgtttgttccgcaaccaaaggttattccaggcagagccacggcctgtcctgttgttgaacccaaagtaacagtttcggtagcaagattgccatttgagaaggatccatctccataagagaccgagtattgacaatttaccccagagcaagatttttggctaagagatgcacattggcttgaggagcatggaagagatttgtaagtagatgactttttaggatcaaaaagtggagagtcctgcatgtaacattttgatggtgggcaaggctcgcactgcgtccatatgaggtcacttcctgtatcagcaacagctagtatttcagtagcgggagtaccaattgatatacgtatgagatattctcccctattgggtattatatcagcttgggaagcggctgatgaagatattgatgagttctgattaaagtgattaagacgattgagagaacgagtcaaagcatttctcaatcgttggtagggagtttcactggagttgtaaaagggagacttgggagagtcacggtggattagctcaacactgaaacctccagtttgagcttctattggagagacaacataaaaacaaagaaagaagagaatgaatgcacaactcaagaaggttgccataatcaaagctgtgattgaggtaataagaaagtggcaacgagtctatgcttatatagaggaggacacagagagataagttgcaaaatttaattaattttgaatagaagaccaaaaaaaaaaaaaaaaggaaagaaaatgagcttccaagaaaatgaaactttcttgtgtagtaagcttttgttatagtgacaattatcttatgggagggcctaagttacgttyaacgtaayttaygccctctcaca

SEQ ID NO: 740 - DNA, 1426 bp, Poncirus trifoliata
  source 1..1426: mol_type = other DNA
atggcaaccttcttgagttgtgcattcattctcttctttttttttttttatgttgtctctccaatagaagctcaaactggaggtttcagtgttgagctaatccaccgtgactctcccaagtctcccttttacaactccagtgaaactccctaccaacgattgagaaatgcttttactcgttctaccaatcgtcccaatcactttaatcagaactcatcaatatcttcatcaaaagcttcccaagctgatataatacccaatatgggagactatctcatacgtatatcaattggtactcccgcgactgaaatactagcagttgctgatacaggaagtgacctcatatggacgcagtgcgagccttgcccaccatcacaatgttacatgcaggactctccacttttttatcctaaaaagtcatctacttacaaatctcttccatgctcctcaagccaatgtgcatctcttagccaaaaatcttgctctggggtaaattgtcaatactcggtctcttatggagatggatccttctcaaatggcaatcttgctaccgaaactgttactttgggttcaacaacaggacaggccgtggctctgcctggaataacctttggttgcggaacaaacaatggtggcttgtttaattcaaaaacaaccggaattgttggccttggaggcggcggtatttcacttatttctcaaatgcgaactacaattgctggtaaattctcctattgtttggttcaggcaagctcaaccaaaatcaattttggaaccaatggaattgtttcaggtccaggagtggtttctactcccttgattgttaaatccaaaaccttttatgctctcacaattgatgcaatcagtgtaggaaaccaaagactagaagttatgtctggatcgactccaggaggagacattgtaatcgattctggtacaacacttaccttattgccacaacgttataactcaaaattgttgtcagtaatgtccagtatgattgaggcacaacctgttgcagaccctaaaggatcacttgaactttgctacagttttaattcactatctcaagttcctgaagttacaatacatttcagaggtgcagatgtgaaattgagtccttccaacttttttgtgaaggtttcgaaggatattgtatgttctgtttttaaaggtaccaatmgtctgccactttatggtaatataatgcagactaactttttggtcggctatgacatagaacaaggaacagtgtcatttaaaccgactgattgcaccaagcaataattaattgggaagcttaatcgatattctccactctactagagtttgatcgagtgattttcaaaccactttctttagcagatcaaccgatttcaaattctaatgcgattggagctgaataaaatctatttaaataaatgta

SEQ ID NO: 741 - DNA, 192 bp, Hyalophora cecropia
  source 1..192: mol_type = other DNA
atgaatttcgcaaagatcctatccttcgtcttcgctctggtgctggctttgagcatgaccagcgctgctcccgagcccaggtggaagatcttcaagaaaattgaaaaaatgggcaggaacatccgtgatggcatcgtcaaagcgggcccggcgatcgaggtcctcggttcggctaaagctataggaaaatga

SEQ ID NO: 742 - DNA, 33 bp, synthetic construct
  source 1..33: mol_type = other DNA
aaaaaactgtttaaaaaaattctgaaatatctg

SEQ ID NO: 743 - DNA, 45 bp, synthetic construct
  source 1..45: mol_type = other DNA
aaatggaaactgtttaaaaaaattggcgcggtgctgaaagtgctg

SEQ ID NO: 744 - DNA, 219 bp, Medicago truncatula
  source 1..219: mol_type = other DNA
atggagaagaaatcactagcaggcttatgcttcctcttcctcgttctctttgttgcacaagaaattgtggtgactgaagctaagacttgtgagaatttggctgataaatacaggggaccatgctttagtggttgtgatactcactgcactaccaaagagaatgcagttagcggcaggtgcagggatgactttcgttgttggtgtactaaaagatgttaa

SEQ ID NO: 745 - DNA, 495 bp, Raphanus sativus
  source 1..495: mol_type = other DNA
atggagaagaaatcactagctggcttgtgcttcctcttcctcgttctctttgttgcacaagaaattgtggtgactgaagccaaaacttgtgagaatttggctgataaatacaggggaccatgcttcagtggctgtgacactcattgcacaaccaaagaacacgcagttagcggcaggtgcagggatgactttcgctgctggtgtactaaaagatgtagcaacgcagcagacgaggtggcgacgccacaagacatggctaagtttgcttctatcattgtccttctcttcgttgctcttgtcgtttttgctgctttcgaagaaccaacaatggtggaagcacagaagttgtgtcagaggccaagtgggacatggtcaggagtctgtggaaataataacgcatgcaagaatcagtgcattcgacttgagaaagcacgacatgggtcttgcaactatgtcttcccagctcacaagtgtatctgttatttcccttgttaa

SEQ ID NO: 746 - DNA, 243 bp, Arabidopsis thaliana
  source 1..243: mol_type = other DNA
atggctaagtctgctaccatcgttactcttttcttcgctgctcttgttttctttgctgctcttgaagcaccgatggtggtggaagcacagaagttgtgcgagaggccaagtgggacatggtccggagtttgcggaaacagtaacgcgtgcaagaatcagtgcattaaccttgagaaagcacgacatggatcttgcaactatgtcttcccagctcacaaatgtatctgctacttcccatgttaa

SEQ ID NO: 747 - DNA, 24 bp, Brassica oleracea
  source 1..24: mol_type = other DNA
ttttggcagaaaatgagctttgcg

SEQ ID NO: 748 - DNA, 21 bp, Photorhabdus sp.
  source 1..21: mol_type = other DNA
tggaactggagcaaaagcttt

SEQ ID NO: 749 - DNA, 30 bp, Urechis unicinctus
  source 1..30: mol_type = other DNA
gcggcgggcatgggcttttttggcgcgcgc

SEQ ID NO: 750 - protein, 437 aa, Arabidopsis thaliana
MASLFSSVLLSLCLLSSLFLSNANAKPKLGFTADLIHRDSPKSPFYNPMETSSQRLRNAIHRSVNRVFHFTEKDNTPQPQIDLTSNSGEYLMNVSIGTPPFPIMAIADTGSDLLWTQCAPCDDCYTQVDPLFDPKTSSTYKDVSCSSSQCTALENQASCSTNDNTCSYSLSYGDNSYTKGNIAVDTLTLGSSDTRPMQLKNIIIGCGHNNAGTFNKKGSGIVGLGGGPVSLIKQLGDSIDGKFSYCLVPLTSKKDQTSKINFGTNAIVSGSGVVSTPLIAKASQETFYYLTLKSISVGSKQIQYSGSDSESSEGNIIIDSGTTLTLLPTEFYSELEDAVASSIDAEKKQDPQSGLSLCYSATGDLKVPVITMHFDGADVKLDSSNAFVQVSEDLVCFAFRGSPSFSIYGNVAQMNFLVGYDTVSKTVSFKPTDCAKM

SEQ ID NO: 751 - protein, 63 aa, Hyalophora cecropia
MNFAKILSFVFALVLALSMTSAAPEPRWKIFKKIEKMGRNIRDGIVKAGPAIEVLGSAKAIGK

SEQ ID NO: 752 - protein, 11 aa, synthetic construct
KKLFKKILKYL

SEQ ID NO: 753 - protein, 15 aa, synthetic construct
KWKLFKKIGAVLKVL

SEQ ID NO: 754 - protein, 72 aa, Medicago truncatula
MEKKSLAGLCFLFLVLFVAQEIVVTEAKTCENLADKYRGPCFSGCDTHCTTKENAVSGRCRDDFRCWCTKRC

SEQ ID NO: 755 - protein, 164 aa, Raphanus sativus
MEKKSLAGLCFLFLVLFVAQEIVVTEAKTCENLADKYRGPCFSGCDTHCTTKEHAVSGRCRDDFRCWCTKRCSNAADEVATPQDMAKFASIIVLLFVALVVFAAFEEPTMVEAQKLCQRPSGTWSGVCGNNNACKNQCIRLEKARHGSCNYVFPAHKCICYFPC

SEQ ID NO: 756 - protein, 80 aa, Arabidopsis thaliana
MAKSATIVTLFFAALVFFAALEAPMVVEAQKLCERPSGTWSGVCGNSNACKNQCINLEKARHGSCNYVFPAHKCICYFPC

SEQ ID NO: 757 - protein, 8 aa, Brassica oleracea
FWQKMSFA

SEQ ID NO: 758 - protein, 7 aa, Photorhabdus sp.
WNWSKSF

SEQ ID NO: 759 - protein, 10 aa, Urechis unicinctus
AAGMGFFGAR

SEQ ID NO: 760 - DNA, 6468 bp, Teosinte-associated betaflexivirus
  source 1..6468: mol_type = other DNA
ctgcagcacaattccctgtagctagtaccaagtataaactaccataacacagatggagttttacaggacagctgcagagaatttccttgacattctgacccctgagcaaagagatgagttaaggatcccattggttgaagagttcaaactcgcatccagaagggattggattcattattcttatgctctaaagaatagtcaaagaaggttgctcagtcaacatggtatcccgctacatccaaatgggtgcttaccgcatccacatccggcctccaaaaccattgagaatttccttctacatggcgtgttatcacatcttgtcaaagagaagatcacattgaacaatgaaaggattacacttttcagtatgaaacagcgaaaatttgatgcatttagggcttctaatgccatatttgacgatttaaattgtgatctctttaatcgcttgtatcatacaaatgatgtcaccagatacgggagtgcatggccaactcagtgtaaaggtgagaattataacaggttcttcaatgtccatcgacggaaatttgaggatagggtggtagttattcatgacgaaatacatcattggggggtgtctgacttggtcagctttctggatgtggccaaaccaaaaaccgtttttgcaacagcagtgtacccagtcgaggttatgtttgggagccacacatcattaaacccatgtctctatgagtttgatataaagggcgacatattgctttattacccagatggtaagaccgatgctaaatatgaacagaaaagaacctttgatatcttaagaatgggtgtcgtgcatgctaataaaacttactgcatatcagtggcaaagacgataggtagtcatcatctgatcgtcattgaaaggggcaatttagctgtggagagattcagggtgtttaatgattttacacattataatccactgatcaatggggaaatgttgtcgagggttagaaacttgagaattgatagggttaagctgacaaagttaataatatacatgatgtcccttaaaaaaccagatgtggaaagctcaatggctaaactgagacaactgtcagatgatattgacccctgtgagattatgctcgccaaggaaataggctccatattggttaaaaaaaatcttgagtttggtcatcgtttttttgaagcttttcacgaatggctgagttcaggattcattaaggagtcattactcatcaatgctggggtgataaatggcgccgatcttctgttaaaagcattcaaaaaagaatttcaacacaaatttgtttttgatcttgaggaaagggccataatagtagatgagtatgtgaggatggattgcaacaacattgttgaggtgtttgattctgcttggatggggtctaatttatccgacattttagataggtccccgatgaagtatgagcttttcgggtttgagcttaattattccatcttagaccttaaattttacatgcttctcaatgcggaaggttccaacgacacaatcagagatatattgacccgaaaggggcgaaaatgcgccgagagacatgtgattgttatctctcgatcaaagaaatggagattgggatggaaggagaatgaggagggagggaggagtgcctctgaagcatcctttgattcggccgagtttgaaagagaaattttagagcttgagaaaagggaggagtttgacatctcgactgtctttaaaagtgaggaggtggaggtgatggagaaaatatcaaaagagggctggaatggaaagaacgtctgtttaatatctgccgtggctgactctgtcaagatggacccgattaatttactgacttttctctttgcctcagatcctgtttactggggatcttggcttttgaggtcagaggggtcagatgaattaagtgtatcaaagttggcagattatctcaaaagggctatagtgattgttgaaggtgagatagaacagctttttggtgttgaaggtgattcggagccgatagttctcgacaagcggggtgatcatgtagttctgcggttgaagcaagaggggatgtttaatttcagcagaccaagcatggacgttcgtcttgctttcgataatgaaataacaaggctaccgtaccattcaagctttgactacgaagtcagttatgaaagaacaaagattttatccaatgaatttcattgtggtagagaaggggttctttttggagagatcaaggacaaaaagatgcttgatattaagaaacatagtgatttcaaccaaagaattcatgtaatctccggcttaccagggtccggcaaaagcaaatttatcgagggtttcgctaaaagacttaaaagcaaaaaaataatagtgatatgccccaggaagaagattaaggagatctgggagaaaagtgttgataatgttgttacttatgaggttgcgctaacaaagagaatggattcatatgatatattcatacttgatgagtacaccttgtatccgccagggtacctggatatagtgattggttcaaatgaaggaagggatgttagatacttgctgattggcgaccccttacaggcagcttttcattcctttgagagtagaaagttaaatgagatcagctttaacatccttaagaatttgccggaacttaactacttatttctttctcatagaatgggtggctgggccaactctatatggccatttgagtgtattggacattcagatgaatggaaattcaatcatgttgtcttccaatcaatagcctcattatttggggtgattaaagatgaggcagaatttccagaggcgtttatttgtgcttcttttgatgataaggtgcttgtgcccaaaaattgcggagtcccagttatgacctttggcgagtcacaaggcacaacctttggaaaggtcgggattattgtcacgggtaactttaagaaagtttccaataatcattggtttgtagcgcttacacgatcaagaaaaggaaattgctttattaactacaccgatgttgcatttgatgttgtcttaaaaagaaaccctgacactcttatttctaggtattataataagagaatctcagaggattttttaaatggttttgtgattgaaagtggtgtgcgaaagatgaacagggtaggaaatgttaacatgaaaagatccgatgttgagatcaagttgtcaggggacccatggctgaagccgtacatgttcatagggaagtgccctgaagcacaaatcatgagaatgcagaaggctttcttgcttgatccagagttcaaaacacaccttcccctctgtgaagagaaaattgactttgcatcaatgtttgaggccctcaaggcaaaggagttccgagaattcagaaagccgtatgatatgtcgtcacaattcattgaccaacagtcaagggaactggagtgcggagctggacaacccttcctgtttgaatccatctatcctaggcacagaaattccgatgaaatgactttttgggctgccgttaaaaaacggttgaggttttcaactccagaaattgaaagggaaaagtatgaaaagaactttaaatttggcagattgatttttgataacttcatgaaatatgtgccaatggaaaagagctttgatgaaaggttaatgtcaaaggtgcaggatgattttgaaataaccaaacttaaaaagaatgctggaacaattgagtcacatgccatgagatcaaatagggattgggatgagctcaatgtttttatatttattaagacccaattgtgcaccaagctggaaaaaaggttctgcgatgccaaggctggacaaactcttgcttgcttttcccatcttgttctttgccatttctcaaagtggtgcaggtacatagatgcaaagctggataaatgtttacatgacttgagaagagcaggaaagcacgacttttatgtgcacacaaggaaaaattttgatgaactcaatgagtgggttaggagacagaagtttaatggggtctgcaccgagtctgattatgaggcatttgatgcctcacaggactccataatcttagcatttgaggtttgcatgatgaatcactttggttttccagttgaaatagtggaggcctacaagcatatcaagtttaatttaaaatctaaactaggaaggtttgctgttatgagattcacaggggagttctgcacattcttgtttaacacattggccaatatggcattcacctttcttaggtacgacatgaataaggtcaaatcaatatgttttgcaggtgatgacatgtgtgctaatggaaacttgagggagatcgatggatttgaggaggtacttggcagaatgtctctcaaggctaaggtctgcagaactaagtgcccaaccttttgtggttggaagttaacgaaatatggcattgtcaaagacagcagattgatctgggagagatttatggtggccaaggaaagaaacaacatgagggaatgccttgaatcttacacattagaggcttgctatgcctatgaattaggtgataggctctttgatgtccttgatgaagagcaactgaggtattattacttgatcaacaggttaattgtcaagaatctaaacagcctgccagcttcaatagcctcgatctattcaaaaatcaattacttgcttgatggaagtgataaaggtgaacaagttcacgaaggaatttgtgagctctgggagtctgacagatcagattcccagtggctcaatttaccgtgatgtgccatggattgggacaggggcaagggcaaagattgccaagcgagagataaatgtgtccttgacccctaaagaagggggttactcgattgaaaatttccctttgctagactcagaagatctaatgtattataaggccgcggctaagagtcatccttacgttgacttaggctgcgttgtgatttcaataaagggactatttagaagaaacgctggtgttaaagggaggctgctgcttcttgatgacatgtttgataacattgagcaggcaaaaatctcagccttcaaatttaaccttgatgagggatttgccgcttttgctgtgtttcctggatactctattgcaacggatgatatgcagctgcaaaggttgaggttaatagtggagtttgaaaacctaaacgttagatcaggttcatacaaaccagttgcaatatctgttgggcttataaccaagctgtcaactacagcattccctccaaagtcaaaactgcttgaagagaatgaatttgttcaccaatcaatagttggttcacaggttttgtccttggaagagattgaggggaaggacaagctggcagaggaatttagagtgcacagctttgttgatgggctgaaaatgccggaggttggcagtagcgttaggagaaggaaggcactattgaggacactacccccaacacgcatcaagacctacaatgctgacggcccaatcgaggttagtgggacaaacgtaaaggtatcgaatggcccatcaataatggatggtgatcgggaggaggtgggatcttcctcaatgagggtgatatccaccgccatggaagctggtacccaactggaagtcagaagaaagtcggtttcatctgttctgttgtaaattagttaggtctggctgaagacgttaaacttagcgcttatggggaggcaaccccatttagaggagtagttaggtttccccgatgttgatgattaaagatgtcgatcgagaggaggattcaggagaacaggaggacgttggtgtcagagattgttgttcaatttgtaatggggggaagagctgtgccggagggagataggatagatgtttgcaatggcataatcaaggatgtttttgggaacatagcctactatcaagcttctgaatcaacaatcttccctgatgtgagaaaacaagtcaccatcatttgtgatagagaagaaggggatgatgtgacccacaactttgagtataacttgaacaggctgaccaatgtgctcagatctgccccggtagtaagtctagagcctttgattaagggggcaacctttagacaactttgcataccgttcgcggaagtggctaagctgtctttgagggagcagtatacattggacggcactgtctcagcacttgcattgaccctgcccaaaatatgtgaaagggcaccatgggtggcctttgatttcaatagggggttaaactatagacttttgacaagtgctgaaaggtcagttattcagaacttaaatagaaggctcttgtctacaactttgaaagtcaatattggggaagcccaggctgacggtgcgactagtgatgtggccgcatagttagcgattcaataaacatcacctctggggtttctataccctctttacccagagtattgtagagggctggctttatctaaggggcctagtttaagttttaaaaattttcttaaaaa

SEQ ID NO: 761 - DNA, 52 bp, Teosinte-associated betaflexivirus
  source 1..52: mol_type = other DNA
ctgcagcacaattccctgtagctagtaccaagtataaactaccataacacag

SEQ ID NO: 762 - DNA, 116 bp, Teosinte-associated betaflexivirus
  source 1..116: mol_type = other DNA
ttagcgattcaataaacatcacctctggggtttctataccctctttacccagagtattgtagagggctggctttatctaaggggcctagtttaagttttaaaaattttcttaaaaa

SEQ ID NO: 763 - protein, 1569 aa, Teosinte-associated betaflexivirus
MEFYRTAAENFLDILTPEQRDELRIPLVEEFKLASRRDWIHYSYALKNSQRRLLSQHGIPLHPNGCLPHPHPASKTIENFLLHGVLSHLVKEKITLNNERITLFSMKQRKFDAFRASNAIFDDLNCDLFNRLYHTNDVTRYGSAWPTQCKGENYNRFFNVHRRKFEDRVVVIHDEIHHWGVSDLVSFLDVAKPKTVFATAVYPVEVMFGSHTSLNPCLYEFDIKGDILLYYPDGKTDAKYEQKRTFDILRMGVVHANKTYCISVAKTIGSHHLIVIERGNLAVERFRVFNDFTHYNPLINGEMLSRVRNLRIDRVKLTKLIIYMMSLKKPDVESSMAKLRQLSDDIDPCEIMLAKEIGSILVKKNLEFGHRFFEAFHEWLSSGFIKESLLINAGVINGADLLLKAFKKEFQHKFVFDLEERAIIVDEYVRMDCNNIVEVFDSAWMGSNLSDILDRSPMKYELFGFELNYSILDLKFYMLLNAEGSNDTIRDILTRKGRKCAERHVIVISRSKKWRLGWKENEEGGRSASEASFDSAEFEREILELEKREEFDISTVFKSEEVEVMEKISKEGWNGKNVCLISAVADSVKMDPINLLTFLFASDPVYWGSWLLRSEGSDELSVSKLADYLKRAIVIVEGEIEQLFGVEGDSEPIVLDKRGDHVVLRLKQEGMFNFSRPSMDVRLAFDNEITRLPYHSSFDYEVSYERTKILSNEFHCGREGVLFGEIKDKKMLDIKKHSDFNQRIHVISGLPGSGKSKFIEGFAKRLKSKKIIVICPRKKIKEIWEKSVDNVVTYEVALTKRMDSYDIFILDEYTLYPPGYLDIVIGSNEGRDVRYLLIGDPLQAAFHSFESRKLNEISFNILKNLPELNYLFLSHRMGGWANSIWPFECIGHSDEWKFNHVVFQSIASLFGVIKDEAEFPEAFICASFDDKVLVPKNCGVPVMTFGESQGTTFGKVGIIVTGNFKKVSNNHWFVALTRSRKGNCFINYTDVAFDVVLKRNPDTLISRYYNKRISEDFLNGFVIESGVRKMNRVGNVNMKRSDVEIKLSGDPWLKPYMFIGKCPEAQIMRMQKAFLLDPEFKTHLPLCEEKIDFASMFEALKAKEFREFRKPYDMSSQFIDQQSRELECGAGQPFLFESIYPRHRNSDEMTFWAAVKKRLRFSTPEIEREKYEKNFKFGRLIFDNFMKYVPMEKSFDERLMSKVQDDFEITKLKKNAGTIESHAMRSNRDWDELNVFIFIKTQLCTKLEKRFCDAKAGQTLACFSHLVLCHFSKWCRYIDAKLDKCLHDLRRAGKHDFYVHTRKNFDELNEWVRRQKFNGVCTESDYEAFDASQDSIILAFEVCMMNHFGFPVEIVEAYKHIKFNLKSKLGRFAVMRFTGEFCTFLFNTLANMAFTFLRYDMNKVKSICFAGDDMCANGNLREIDGFEEVLGRMSLKAKVCRTKCPTFCGWKLTKYGIVKDSRLIWERFMVAKERNNMRECLESYTLEACYAYELGDRLFDVLDEEQLRYYYLINRLIVKNLNSLPASIASIYSKINYLLDGSDKGEQVHEGICELWESDRSDSQWLNLP

SEQ ID NO: 764 - DNA, 4710 bp, Teosinte-associated betaflexivirus
  source 1..4710: mol_type = other DNA
atggagttttacaggacagctgcagagaatttccttgacattctgacccctgagcaaagagatgagttaaggatcccattggttgaagagttcaaactcgcatccagaagggattggattcattattcttatgctctaaagaatagtcaaagaaggttgctcagtcaacatggtatcccgctacatccaaatgggtgcttaccgcatccacatccggcctccaaaaccattgagaatttccttctacatggcgtgttatcacatcttgtcaaagagaagatcacattgaacaatgaaaggattacacttttcagtatgaaacagcgaaaatttgatgcatttagggcttctaatgccatatttgacgatttaaattgtgatctctttaatcgcttgtatcatacaaatgatgtcaccagatacgggagtgcatggccaactcagtgtaaaggtgagaattataacaggttcttcaatgtccatcgacggaaatttgaggatagggtggtagttattcatgacgaaatacatcattggggggtgtctgacttggtcagctttctggatgtggccaaaccaaaaaccgtttttgcaacagcagtgtacccagtcgaggttatgtttgggagccacacatcattaaacccatgtctctatgagtttgatataaagggcgacatattgctttattacccagatggtaagaccgatgctaaatatgaacagaaaagaacctttgatatcttaagaatgggtgtcgtgcatgctaataaaacttactgcatatcagtggcaaagacgataggtagtcatcatctgatcgtcattgaaaggggcaatttagctgtggagagattcagggtgtttaatgattttacacattataatccactgatcaatggggaaatgttgtcgagggttagaaacttgagaattgatagggttaagctgacaaagttaataatatacatgatgtcccttaaaaaaccagatgtggaaagctcaatggctaaactgagacaactgtcagatgatattgacccctgtgagattatgctcgccaaggaaataggctccatattggttaaaaaaaatcttgagtttggtcatcgtttttttgaagcttttcacgaatggctgagttcaggattcattaaggagtcattactcatcaatgctggggtgataaatggcgccgatcttctgttaaaagcattcaaaaaagaatttcaacacaaatttgtttttgatcttgaggaaagggccataatagtagatgagtatgtgaggatggattgcaacaacattgttgaggtgtttgattctgcttggatggggtctaatttatccgacattttagataggtccccgatgaagtatgagcttttcgggtttgagcttaattattccatcttagaccttaaattttacatgcttctcaatgcggaaggttccaacgacacaatcagagatatattgacccgaaaggggcgaaaatgcgccgagagacatgtgattgttatctctcgatcaaagaaatggagattgggatggaaggagaatgaggagggagggaggagtgcctctgaagcatcctttgattcggccgagtttgaaagagaaattttagagcttgagaaaagggaggagtttgacatctcgactgtctttaaaagtgaggaggtggaggtgatggagaaaatatcaaaagagggctggaatggaaagaacgtctgtttaatatctgccgtggctgactctgtcaagatggacccgattaatttactgacttttctctttgcctcagatcctgtttactggggatcttggcttttgaggtcagaggggtcagatgaattaagtgtatcaaagttggcagattatctcaaaagggctatagtgattgttgaaggtgagatagaacagctttttggtgttgaaggtgattcggagccgatagttctcgacaagcggggtgatcatgtagttctgcggttgaagcaagaggggatgtttaatttcagcagaccaagcatggacgttcgtcttgctttcgataatgaaataacaaggctaccgtaccattcaagctttgactacgaagtcagttatgaaagaacaaagattttatccaatgaatttcattgtggtagagaaggggttctttttggagagatcaaggacaaaaagatgcttgatattaagaaacatagtgatttcaaccaaagaattcatgtaatctccggcttaccagggtccggcaaaagcaaatttatcgagggtttcgctaaaagacttaaaagcaaaaaaataatagtgatatgccccaggaagaagattaaggagatctgggagaaaagtgttgataatgttgttacttatgaggttgcgctaacaaagagaatggattcatatgatatattcatacttgatgagtacaccttgtatccgccagggtacctggatatagtgattggttcaaatgaaggaagggatgttagatacttgctgattggcgaccccttacaggcagcttttcattcctttgagagtagaaagttaaatgagatcagctttaacatccttaagaatttgccggaacttaactacttatttctttctcatagaatgggtggctgggccaactctatatggccatttgagtgtattggacattcagatgaatggaaattcaatcatgttgtcttccaatcaatagcctcattatttggggtgattaaagatgaggcagaatttccagaggcgtttatttgtgcttcttttgatgataaggtgcttgtgcccaaaaattgcggagtcccagttatgacctttggcgagtcacaaggcacaacctttggaaaggtcgggattattgtcacgggtaactttaagaaagtttccaataatcattggtttgtagcgcttacacgatcaagaaaaggaaattgctttattaactacaccgatgttgcatttgatgttgtcttaaaaagaaaccctgacactcttatttctaggtattataataagagaatctcagaggattttttaaatggttttgtgattgaaagtggtgtgcgaaagatgaacagggtaggaaatgttaacatgaaaagatccgatgttgagatcaagttgtcaggggacccatggctgaagccgtacatgttcatagggaagtgccctgaagcacaaatcatgagaatgcagaaggctttcttgcttgatccagagttcaaaacacaccttcccctctgtgaagagaaaattgactttgcatcaatgtttgaggccctcaaggcaaaggagttccgagaattcagaaagccgtatgatatgtcgtcacaattcattgaccaacagtcaagggaactggagtgcggagctggacaacccttcctgtttgaatccatctatcctaggcacagaaattccgatgaaatgactttttgggctgccgttaaaaaacggttgaggttttcaactccagaaattgaaagggaaaagtatgaaaagaactttaaatttggcagattgatttttgataacttcatgaaatatgtgccaatggaaaagagctttgatgaaaggttaatgtcaaaggtgcaggatgattttgaaataaccaaacttaaaaagaatgctggaacaattgagtcacatgccatgagatcaaatagggattgggatgagctcaatgtttttatatttattaagacccaattgtgcaccaagctggaaaaaaggttctgcgatgccaaggctggacaaactcttgcttgcttttcccatcttgttctttgccatttctcaaagtggtgcaggtacatagatgcaaagctggataaatgtttacatgacttgagaagagcaggaaagcacgacttttatgtgcacacaaggaaaaattttgatgaactcaatgagtgggttaggagacagaagtttaatggggtctgcaccgagtctgattatgaggcatttgatgcctcacaggactccataatcttagcatttgaggtttgcatgatgaatcactttggttttccagttgaaatagtggaggcctacaagcatatcaagtttaatttaaaatctaaactaggaaggtttgctgttatgagattcacaggggagttctgcacattcttgtttaacacattggccaatatggcattcacctttcttaggtacgacatgaataaggtcaaatcaatatgttttgcaggtgatgacatgtgtgctaatggaaacttgagggagatcgatggatttgaggaggtacttggcagaatgtctctcaaggctaaggtctgcagaactaagtgcccaaccttttgtggttggaagttaacgaaatatggcattgtcaaagacagcagattgatctgggagagatttatggtggccaaggaaagaaacaacatgagggaatgccttgaatcttacacattagaggcttgctatgcctatgaattaggtgataggctctttgatgtccttgatgaagagcaactgaggtattattacttgatcaacaggttaattgtcaagaatctaaacagcctgccagcttcaatagcctcgatctattcaaaaatcaattacttgcttgatggaagtgataaaggtgaacaagttcacgaaggaatttgtgagctctgggagtctgacagatcagattcccagtggctcaatttaccgtga

SEQ ID NO: 765 - DNA, 6393 bp, Tomato brown rugose fruit virus
  source 1..6393: mol_type = other DNA
gtatttttgttttacaacatataccaacaacaacaaacaacaaacaacaacattacaattactatttacaactacaatggcatacacacagacagctaccacatccgctttgctcgacactgtccgaggtaacaataccttggtcaacgatcttgcgaagcggcgtctttatgacacagcggtcgacgagttcaacgctcgtgatcgcaggcccaaagtaaatttttccaaagtaataagtgaggaacagacgcttattgctactagggcatatccagaattccagataaccttctataatacgcagaacgccgtgcattcgcttgccggtggactacgatccttagaactggaatatctaatgatgcagatcccgtacggatcactcacatatgatataggtgggaattttgcatctcatctgttcaaaggacgggcatatgttcactgctgtatgcccaatcttgatgtccgcgacataatgcggcacgaaggccagaaagacagtatagaattatacctttccaggcttgagcggggcaacaaagttgtcccaaatttccaaaaggaagcttttgacagatacgctgaaacgccagacgaagttgtctgtcacagtaccttccaaacgtgtacgcaccagcaggtggaaaacacaggcagggtgtatgctattgcattgcacagtatatacgatatacctgctgatgaattcggagcggcacttttaaggaaaaatgtccatgtttgttacgccgccttccacttttccgagaatttacttctcgaagattcacacgtcaaccttgacgaaatcaacgcgtgtttttcgcgtgatggagacaagctgactttttctttcgcatctgagagcactttaaattattgtcatagttattctaatattttaaaatacgtgtgcaaaacttacttcccggcatctaatagagaggtctacatgaaggagtttttggtcaccagggttaacacctggttttgtaagttttctaggatagatacttttttattatacaagggggtagcccacaaaggtgtaaatagtgagcaattttacagcgcaatggaagatgcatggcactacaaaaagactcttgcaatgtgtaacagcgagaggattcttcttgaagattcctcatcggtcaattactggttcccaaaaatgagagatatggtcatagttcctctattcgacatatctctcgacaccagtaaaaggacccgcaaagaagtcttagtgtcaaaggattttgtattcacagttttaaatcacattcgcacttatcaagccaaggcacttacatactccaatgttttatcctttgtcgaatcaattcgttcaagggtaattatcaacggagtgactgccaggtctgagtgggatgttgacaaatctcttttgcaatccttgtccatgacatttttcttgcatactaagcttgccgttttaaaagacgaattgttaatcagcaagtttagtttggggccaaaatcagtaagccagcatgtatgggatgagatttccctggcttttggaaacgcatttccatcgatcaaggagagactgctaaatcggaaactaattaaagtgtcgggagacgcattagaaatcagggtgcctgatttatatgtgacttttcacgatagattagtgactgagtacaaaacatcggtggatatgccagtgcttgatatcagaaagagaatggaggagactgaggttatgtacaatgcattgtctgagctatctgtgctcaaggagtcggacaagttcgacgttgatgttttttcccggatgtgccagactttggaggtagacccaatgactgcagcaaaggttattgtggcagtgatgagcaacgagagcggactgactcttacattcgaacagccaactgaagcaaatgtcgcattggcacttaaagattcagaaaaagcctctgagggtgcactagtggttacttctagagatgttgaagaaccatccatgaagggttcaatggcaagaggagagttacaattggccggtctgtctggagaccaaccagagtcttcctatactcggaacgaggaaatagagtcattagagcaattccacatggcaacggctagttcgttaattcggaaacagatgagttcgattgtgtacacgggccccattaaagttcagcaaatgaaaaactttattgatagcctggtagcatcactctctgctgcggtgtcgaacctagtcaagatcctaaaggatacagctgctatagatctcgaaacccgtcagaagtttggagtcttagatgttgcgaccaaaagatggttaattaaacctttagccaagaatcacgcatggggcgttattgaaacacatgctaggaagtaccacgttgcacttttggagtatgatgagcatggagtggtaacttgcgacagttggagaagggtggccgtgagttctgagtcaatggtttattctgatatggcaaagctcagaacactgaggagattattaagagatggtgagcctcatgtcagcagtgctaaagtcgtcctagttgacggtgtcccgggttgtggaaagacaaaagagattctctcgaaagtaaattttgaggaagatctaatcttagtaccgggtaagcaggctgctgaaatgataaagaggcgtgctaatgcgtcaggaataattcaagccacaagagataatgttcgtactgttgattcatttataatgaattacggtaaaggaacacgctgtcagttcaaaaggttatttatcgacgaaggtctgatgttgcacactggttgtgtgaattttcttgtttctatgtctctgtgcgaaattgcatatgtttatggagacacacaacaaattccatacatcaacagagtatccggttttccgtaccctgcacattttgcaaaaatagaggttgatgaggtggaaactcgcagaactacgctgcgttgtccagccgacattacccactatcttaacagaaggtacgaaggatatgtcatgtgtacatcgtcggttaaaaagtcagtttctcaggaaatggtgagcggggccgcaatgatcaatcctgtatctaagccattgaatgggaaagttttgactttcactcagtctgataaagaggcgctgctttctcgaggatatacggacgtccatacagtacatgaggtacaaggtgagacatatgcagatgtgtcgttggtcagattgactccgacacctgtatctatcatcgcaggagatagtccgcacgttctcgtagctttgtcaaggcatacccaaacattgaagtattacaccgtagtgatggatcctcttgtaagtataattagggatttagaaaaacttagttcttacttgttagatatgtataaagtagatgcagggacccaatagcaattacaggtagactccgtgtttaaaggttctaatctttttgttgcagcaccaaagactggagatatctcagatatgcaattttactatgataagtgtctcccaggtaatagcaccatgttaaataactatgatgctgttaccatgaggttgactgacatttctcttaatgtcaaagattgcatattggatttctctaagtctgtggctgcaccgaaggatccgatcaaaccactgattccgatggtacgaacggcggcagaaatgccacgccagactggactattggaaaatttggtggcgatgatcaaaagaaactttaattcaccggagttatcaggaataatcgacattgagaatactgcatctttagtagtagataaattttttgatagttacttgcttaaagaaaaaagaaaaccaaataaaaatgtttctttattttgtagagagtctctcaatagatggttagagaagcaggagcaagtgaccattggtcagcttgcagattttgattttgtggatcttcctgccgttgatcagtacaggcatatgattaaagcgcaacctaagcagaagctggatacatcaattcaaagcgaatatccggccttgcagacgattgtgtatcattcgaaaaagatcaacgcaatcttcggtcctttgttcagtgagctcacaaggcaaatgctcgaaagcatagactcaagtaagtttttgttctttacaaggaagacgccagctcaaattgaggatttcttcggagatctcgatagccatgtccctatggatatcttggagttggatatttcgaagtatgacaaatctcagaacgagttccactgtgcagtagagtatgaaatatggagaagacttggattagaagattttctgggagaagtttggaaacaaggccacaggaaaactactcttaaagattacacagctggtattaaaacgtgtttatggtaccagagaaagagtggggacgttacaacattcatcggtaatacggtgattattgctgcttgtttagcttccatgttgcccatggagaaaataatcaaaggtgcattttgcggagatgacagtttactatacttcccaaaaggttgtgagtttcctgacatacagcatacagccaaccttatgtggaatttcgaggctaagctattcagaaagcagtatggttatttctgtggaaggtacgtgatacatcatgacagagggtgtattgtttattatgaccctttgaagttgatttctaaacttggtgctaaacacatcaaggattgggatcacttagaagagttcagaagatccctttgtgatgttgcaaattcgttgaacaactgtgcgtattacacgcagttggacgacgctgtgagtgaggtccataaaaccgcacccccgggttcgtttgtatataaaagtttagttaaatatctgtccgataaggttctttttagaagtttgtttatagatggctcttgttaagggtaaagtcaatattaatgagttcatagacttgtcaaaatcagaaaaatttcttccgtctatgttcacacctgttaagagtgtcatgatctccaaggttgataagatattggttcatgaagatgaatctttgtccgaagtcaatttactcaaaggtgtaaaactcattgatggtggctatgtacatcttgctggtcttgtggtgacaggtgaatggaatttgccagataattgtcgtggtggtgtcagtgtctgtttggtcgataagagaatggagagagcggacgaggcaactcttgcttcatactataccgcagcggctaagaaaaggtttcagttcaaagtcgttccaaattacaacatcactaccaaggacgcagaaaaggcagtttggcaagtactagttaatattagaaatgttaaaattgctgcgggttactgtccgctgtcattagaatttgtgtcagtgtgtattgtttataaaaatattataaaactcggtttgagagagaaaattacgagcgtcacggatggagggcccatggaactatcagaagaagttgttgatgagttcatggaagaagtcccgatgtctgtaaggcttgcaaaatttcgttcgaagaccggaaaaaagtttagtagtaaaagtgagaataatagtggtaataataggccgaaaccagacaaaaaccaaaggaaggaaaagggtttaaaagttagggttgagaaggataatttaattgataatgaattggagacttacgtcgccgattcagattcgtattaaatatgtcttacacaatcgcaactccatcgcaatttgtgtttttgtcatcagcatgggccgaccctatagaattaataaatttatgtactaattcactaggtaatcagttccaaacacaacaagctagaacaaccgttcaacggcaatttagcgaagtgtggaaacctgtccctcaagtcactgttaggtttcctgacagtggttttaaggtgtataggtacaatgcggtactagatcctctagttactgctttgttaggagctttcgatactagaaataggattatagaagtcgaaaatcaggcgaacccgacaaccgccgaaacgttagacgctactcgtagagtagatgacgcaacggtggctataaggagcgctataaataatttagtagtagaattggtcaaaggaacaggtttgtacaatcagagcacatttgaaagtgcatccggtttacaatggtcctctgcacctgcatcttgagataatcgagatgcttaaataacagattgtgtctgcaaacacacgtggtacgtacgataacgtatagtgtttttccctccacttaaatcgaagggtagtgtcttggagcgcgcgggacaaatgtgtatggttcatacacatccgtaggcacgtaataaagcgagggattcgaattcccccggaacccccggaggggccca

SEQ ID NO: 766 - DNA, 11519 bp, Celery latent virus
  source 1..11519: mol_type = other DNA
aaaatttaaatttatgagcaagagaatatatacgattattgttgttttgtgctttcaggtttgctttcaaaatctccgaacacagcctacacaatcttcacataccttctcaacaaatccggcgatccccggtaccgacgctcttcaatttgaagaaaacgcaaacttaacttactctaccataaaatacaatattttaaagtttaatttaaattacaaacaatcaatcatgtctgtggtctctttcgggtcaatcacgagcatggacttcgatgctgcatgtctagcagctatgatcgaaacccctggtggctctattccaccaactccacaatcaccacccacttcaccagtggcggtgaaacaaaggaaaattttaaattttccaattgccaaaatcaggacaactcctgatgcatcttttgagatgtgtgtgaagttccccgagagcttcattgattccttctgtgctcaagcacagaaagaattaaaatattggcacgctgctattacgcagttgaaattctttggtggtgagacaccaaagactcttgaaaccttggtgaaccaaggtcaagctcacactcaccaagttattttaaacttggttaaaatccttgatagtgctccaaaagcaattcaaggaaagaaggagttggaaaatttcttccagctgagcccacatggaaacaattccaaagaaccaattgacgttagtcgaaaggtttatatggaaccgtgcaaaataagtccacgcaagcgacaagtgtgctcctgtgacaatgacgatgatgcacattatcattgttactattgtgatattgtgtgttcaagcaaaaatctattgcaagaacacgaaagggatttttgcgaggatgcacagtcagtgcaagcatttgggtataaacttgagagtccaaatgtctttgacccaccccatgtgacgcagcaaaggagtgttgcaccatctttgggaaaaactttggaatctcctgtgaaatctccagagcagtcaaagccaaacctggagaaaagtttcccactagtggaatcttccaccaacagtggcatgatcttctttggatcaatagctaccatggttccgtctcatattgaaaaatatgtgaggaattgtgaaactgagaatccgattgatgcagctgcatcaaatttggcgatgcaagaagctaaaagctctggcgctccttgtatagtagtgcatcataaggcactaccaggtggaaagaaagattttctttttcctcataactctcctcaagttgtgagaactgaaaccgaagagccaattgctggtaccattgatagaccaacaataaaacgtgctttatttacccgcattaagaagaaagcacaagaaatttgtgtgaacccagggggaaccatccagagaaaaacaaagcgatggttgcggccagcggaagttgcacaaattgtgcgagctacctctgatccacaacatccattgttcaaggtggacgttactcaaattattgaagttgttcatcctgtttataggactgaaagaactgaagttgtgcagcaatgcataacaaggggaacgtacaaattgatgtctaaagcccaacaacggaaggcacgagcaatgcgctcagctggaatgttagtgatcactgataacccaacaacgcattgggtatctgaacctcagaaaatgctagtggtaaaggaaaaactgagcacaacaaagcatgtgaaactccggaatgttgaagtgaatgctgaatctgaaatgttttggggaactaaaacaaaggagggaccctcgaaaacagccttaaagcgctgtaagcgtaacatcgatcgcttggctcttcttgatccgcaaatgggtgagtctgcgaatggtgaatgttggatgaacacctttaagcaccatttaaaagtggggagcattgatattcttccaaataaggttcgtttaccaaaccttaggtcggcattctcacgatggatacctttggttgattatgttgaaattttgaaatttcattgtaagtcacaaccaaagcttaaaagggttgtgatacctactccagttacttatctggaaggttctagatatcacattcatgttggttatagcaagaactgctcatggattacggtcgaacaactaattaggcaattgcagactctgttaacatcatccaaatatggagaacattttaagagagcaattgttggtggtgaaccggaagacaaattcacaccagtggttcctatagttgacgtggaaactgagagagctaaatctagcttggcaaaatggacaactgcgcaacagagatatatgggatctattagaacccgaatcaactcacaagcagaaaaacataaaatcgattcggaaaaaaagatctggataccaatgaggcacgacacgatggatatgttaactccaccatatcttttcgaaaatgggctgagaaacaacgaagttcaacaagtcggccaggttcttggagattctgtagatcgtgctggaaacagttcaggtcagagttctcaatgccaacaacaaaatgtggcgcttgcatccgaaggaaacaacgacaacgtgataaacgagagcgtgcgcagcattcaaaacttagttactgccaatatgcagttgcaagagcaatgcaaattgttgctcgcctcacacgaacaagctatcatggactccgtagaacacggaaacttggagattcagaagcacgatgtagaggtctcgcagaaaccatcaacgaggaaaagcgactcacagaggaatttgcaaaaattctcattgaagaaaatagtcgcctcagaagagatgtcgagaacattgggcagaggatggagaaaatctgtcacctcaatcggtgttccaattgtgagtgcttccattgcagaagctttaaatcaagtcgttcaaaggggaaatacttcctggcttgatgtaggcatttctggaacattgttgaagcaatgtactctttttgctacgagaacttttcaagcgtattgtagctacaaattagcacgaaacgtgctgacattaaccgtgggagaattgtatgataatgtgaaatcatacatcaactctataatgggttccacagatcctgaagtgactggtttcttgtcgcaagtacgtagcgcaccttcaatggtgaagatggccattttgctcacaatgtttgctatctcggtgaaattaatgagaaaattcttcaaggtgaagaataatggaactagctttactgtaagcggagagaatgtctctgcaagccagttgcgaatctcagcacaggctcaagctcgatcaactgacaacatgaccccaactgtaaagaagctttgtagcattcttggaatgattggtttggtttgttgttgttacgatagaacaacatgggcatatcaaaaggattggatggatgcttggatcacaagtatcacatatgccggtgcatctgatagtatttgggaatcaatttcccatccatttgaaacattgcataacattgcagtgagtggaggagatcgttcaccagaaactacagctcgtttggagcgaattttggctggtgcagggttgaacgcacaagcccaagcacttgatgaatttggagcgtctagctcagtgatgggtcagacactgcaaaacatattggatgaggttgaaagtacaaatgtgtcaatcgttagtgaaatgaaagcattgccacactaccaccgaaatgccactaccttcaatcaagcggctcgtgatttagtgactgaaccagatgcaacatatcaaatgttgttaacagcagcaactggtactggaaaatcaacgcttttcccagtgcacctaaggtcacaatctcaaaagagagtcttgctgctcattcctctcgttgcagcaacacatggagtttaccagcgacttaaaagtcaaagggtgaatgatattggttaccatgctgattcaatatctgaaaacccaaatgctaaattaatcatctcaacatatggacacatgtgtgtgaaattacttggtggtcaaaacccttttgatcaatttgattatattttagctgatgaatgtcatgttgtaacactcgagactgttacagtgatatcccatttactccaacagcgagaaatggcgacgtggaaaacagttttcatgacagcaacaccattcaacaatatcacacttaatagtgttgagacagaacagcctgtaatcatgcaacagaccgagcatttccacaaccccaaaagctttgtagattttctaaaagctggcggcactgaaagagtgcaaacatatgctaagggaggctgcatcgtattctgttctacccaaaaagaaactgaggaatcagcgaaagctcttaaagcgagtggggttattgcactcttttaccatgcctctaaccgattggaatgggattcctttgcaaagaaaaatgagcgaagcatgggacaattaaatttttatctctttgctacaaatgcactagaatctggtgtgacgatccctatgaaaagttgcgttgattttgtaactaaaatgcatccagtagttggtggagataggaagactattactatggctccaacttcaattagcattcaagagcaattgcagcgtcgaggtcgagttggacgaacttgtccaggtgggtatctatacacatcagttggaaccccgttgatgtataaacttgacccagattcatccattaagtacttgttgtactgttggaagagtggtatcaaatgttataaggaagcattaaatattcctgatgaatgcacgataacattcactaaagagaaaattggtgctatttggacacatgacacaccgccagttgttacagcagccttagtggataattttggtgcagtttacaggaatgcaaacttcttcttagcatcacatcgaagaaattatgtggaaattccacatacaactgatatgattctgccctcaactctctcgacatgggagaattttgaattggatgggaatgaagtatcagatggcacacgaatgagagtaccacaaaatcatttctttttccgaaacgaaagggtccaagagagttggttgaaattgcaagctgcaattcttactgaactaactgaagcagaagccactaagaagcgagatatagttatcgagaatctgatggcgcgtcgagtatcgggccatcctgcttcgaagcttgaaatagctagaatgataatggccaaacaacaagtggtacaacaagcaagagacacgaaacgtgttcgagaaacccttagtgagagtatatctgattactccggcatcttctcaaacttttctggaatattttcagttcaagaaagattgaaaaaggcttctatcaaggctaatgaggaattagatatggttattcaggaaaatgaatcccatattttatttctacaagacatgataaaagaaactcctgagatcatccctgatatggctttagaggagcagatccaacatatggaatatgcaaaagccatattggaaaatggttggatcagtgggaatcctcaagcaaagcttctcattatgcgcacaacgcataaaaattttcatgatcttgttacaaaaaccaaggatgggacctatcgcatgaaatcatatgtgcaacgcatgttcgattttgtgaagaaacatccattgttaatttttatgtccattatgatgggaacgtcattagcagcaggatacttcatgatgagtaaagactctgaagatgacgatgcaatagtgcaggacaaggttttcaaacgcaatgataaggcaatgctggaatggtgcttgagaggcaaagcatgtaaatgtgacgccacacacttcgaggcacagtatgtacttgattcacgtcattatagaactattctcgaagattgggtaaagttcccattgcgagggttccacaatatacaaatagtaaactatggcacagtgagcaaatatgcacgtgctctagctttcctatcagtttgtgcactcttagctaacccgactatggtgtataatagcgcagcacattccatggctggaaatagtgagtataatgagtcagtagcaaaatccctaatgcacaatattctaagagattggaatagagtcccgctcatagacttattggtaaaagggatagatggaagtgatgatcgttatgatcagtacatacatgaattatatacaagtggaggcctaattgcatttgaatcagacactggaaagtttgaaggaaaaatgtctattagtcaatatcgaaaggatgctgctaaaggacaaacaaaacgtagtgcagcttcacggtcacgtgaagaagatcattatgatccgagatcatcaggtcgactcaagagtgggatcagacgagcatatcgtcaattctataatattgaagattctgatgtgcaggaaattatcctcacaaacaagaaaggagctccaattcttaaaattgggagtcttgatgaattgaaccaacatgttgatcttctaaaattctcagatccagaattgtatgagttgtatttacatgctcgagataaattggatcttgacgaacctgaaagttcaagcggcttcactggaaagtggggtgactatgcggaagatgatgaattcatgaagatgatatcagctttagattcgttaacaaaacaagcttcggaggaagcatttataccagttcaagtgaaacttcgagatgggcgaactgtccaggcaaatgtcgcacgttattggcaaaaagattatccaactggaaaatctgtgaagcaatgggctcaaactacttgggctccaccacaattcacagctcttcgagaaagggtaggaaaagctcttgaactgattcctgaatcgcgaccaattcatcttcatggaaaagtcccaaatggaacacttatagagttccaagatgcaatgaaagatctgcacgagaagacagcagtcaaggctgtagctgaggctaaaatcggagatactcaatttgaggcggatccttctgatgtaacaagccgggttggtgtggttatggtgaaaacatcagcaaacgctgaatgggaatcatggaaccaatgtgttgctttgaataacatagtgatttttccccatcattacacgcttaaagatggtaataatttgagattcaagttttcatcaagtgatttcgaaagcacctgtcacattgtggatgggtacaatgggcttgacatggcttgggctccaattaacgttaaaattcgtggtttgaagaagaaagtttgtttaggcacgccgcggaatggatcttacctatggcatttttccatgattaatcaagggaaagatttgccagaggctcgtcttatgggatactcctctgtaacgaaagtacaagaagagtcgcacccatccttcgattggacacatacagtctcaacgcaagttgggaactgtggtggaccctttgttgataaacatggtgtcattgttggatatcacactggagcttttcaattgggacaatttaatactttcctgggattatcagcaccactaattgcacatctgacaaaattggatgtcaaaccaagtgcccagccccaatcaaagatgatttggagggaagtggatttttatcgatcaccaaattacttacccccaaccattaataaccaagagccaattccagaggagtggagatatccagaaggtaaatctgtttacccatgtgttgatccaggatggatgggttctcgtttggtgaagggatcaggttttcgtctcattggaaaaatgcaacgtcatgtggaatattcaacgaagatttcccttaatgagcattttgacatgtggatgtctcaagagaaaactcaaaatgagttaactaggctgaacaaaaatcgtgtagagaaagggttagagaaagctttcatcagtcacacgatagcagctcagaacaaggaagctgcaattaaagatacgagcaagtatgctagaacaacgttgggaacatattcagaacctttgttgaaaagagcgactgctctgacaatccaaatgctcgaggagcatattaagctatgtaaacgccaaccactggatttagtctatggggatatggaatggaacacagcatgtggagcccagtacaatggattgaaatcagcatttagggatcaagttgttggcatcgagaatatggatgcttatggtcaatactgctgggagcgtttcaacgttccaaccgatcaatacaaaccatgcatttggacaaattcattgaaggatgagttacgaccaattgaaaaagtgaaggagaataaaacgcgcactttcactgcagctccaatcgagtttgtaattggtgctaaacaagctgttgatgcattcaatcatcaattcatggatgcacatttgaagctaccacataccgttggtattaaccaatggtcagggggttggcacaaactatacaagaagttgtatggtaaaaactttgtgtactcaagtggagatggaagccggtttgactcaagtccgtgtttctatatgttcgatgccttgtacacaatacgtacatattttgcagatcctgaaatacaccaggttctggagaatatctacttggaggtttgtcacactccaatagtgttacacgatgggaatgttgtgatgaagaatcatggaaacaatagtggacaatgttctactgttgttgacaatagtctcattatgatgattctatgttgcgcctcttatctagagcacactccagctaccatgcattccctcgatgcaataaaaagccattggcatttttgtgtgaatggagatgattatattggaggaatgtcaccattgttagcaagccatttgactaaagagaagatggcaaaaaccttcagtgacttccagttcatatatgagtggtctgattattcaccatcattatttgaacaagattatatgagtttaaaattcataaacattgttgaacgaaaaggacaaacaactggacaacagttaattgctccatggcgtgaagcatcacgacaactctccactttggctcacacatcaagtggtgcacctgaaatcaaattacaagttgctctaaccgagagggtgaaagcatgggttgataaagatttatttgatttcataacagaatactgcagatggctcgtggagtatttcgatagatttacgaacacgcaagcatggaatgaagctaagaagttatggtgggatgaacaacaaattttcaaccattatttcagttttgaaagcatttgcaatgcgccatactcacaaattgtaaacgaaactcctgatgagttctttgctaatggtgtgagagagtcccgaccattgcgaatcctacgcgatggcatcaaatttggtgttgctgttacagcagctaattatctgggaccaagcgatcacgatgtacccatgattgcaaacacaatgcttaatgttgccaagataggtctcgcaaattcaacagccgagcggattgaccgtatgctatttgggaaggaaaaccctgaacatagtagagcggattcgctagttgttgtaaaaacagagcaaacagatgcgacgatctgtttgcgaactcactgcaaatgccaagcacagcacttcgatgggaaatatgagtgttgggtgagttccccatctgttgctataaaaatgtttgcaacattaaagccccggattctttccacaacgaaatttgttggagttaagtttctaccaaaaatactaagagctcatgtatgggccttatacctatctggattctcttgggaagaaacaatgcaaattgtgcaaagtcactaccctggcgagaaacagcaaagaaaagcggattggttcctacagcaactgctgaaagagctagtattgatattcaaagtgaaagggtcgaagtttattgagttgggagagcatgctcaagttcaagggaaaactcaactcgactctacacaagttgatatggatccaaattttaatgctgcagcttatgctgcaactcttcgaggaggaccgcactggggtacacataattcccaaggtctgtttgatgctattaaggtattaaaccccaatgcagcaaatgttgacattgggaatgcgcgaactgcggttcagcgcgagatgcagcggttgatagctgccgatgctccgcgacaacaaccaccaccacaagttggtggaggacaccaacaaccacctccagctggaggtcaaacgcaaggccagcctggtggttacacaccgagccaggcatttaccaataaatttggtaatataatggctgagcccgatgcccccctcgtgctcgactctcaagcaacaatgagggaagttgcccaaattgaggcagcttgggctcgtcttctagaggtgcaatctctagagggtcttggttccttctggaactacatgttttcctatgtgggaaacaatggcacctcatctggaggtgatcccagggattacatccctgcaggaaatgggcgagttacacttgcccaactaaagtccaaagctcaaggtgagcaatggcgacgttattggcgtagtcatgcgtcagacatgagggatttcttgaggcttcttcaagcttcagatagacctttgcctattcgttgggcaagaaacaatggcattaaagatgccaattacgagattgcattcgattttgcggatgcactcccagatctctcagctgcacaaatgtcaattattttagcagctaagaaccttgccgtaaggcgaggtcaaggccagatgcttaatgctggcaccaaggttggaggtcggtcaagaaccgaaacctatgaccaggctgtccgcgatgctgcggatgtccaattcccaggagcataattttattatgcaacacaacactctttttgactggggggtgatgtgtctggacttgttacagtctttttctttttcaagtgatgtggaatggaccttgaatcaaataacatttgattttggattcacatcattaatcttcaatagggtggatggccctccccttttggagtcgtacaggacgtatcctgttttatttagtaacatagcaataaacacaaaccaccatgtagatagccgtttcagtggtttggttgtgtgtttttcatttctgtcagaaaacttccaaaaatacaaaaatataaaatttttattttgtcattttggttcgttgggcccaagcgtcttgcatagcatgtcgttcattcctgaaacgagtcccccgatagtttcacaattagtgtaccggacaccttttaaaatcattttcacactttgtgatgaatttgtaaggcgtgtgcgcgtgaaaccgtggtttggacctttggaaagaggctacgctctgtaggtagttttcgatagaaaatggtttcccttaaggaaactgttttgttactttggagttccggcccccaaagtaaatttt

SEQ ID NO: 767 - DNA, 6552 bp, Black grass varicosavirus-like virus
  source 1..6552: mol_type = other DNA
cgccaatttcaaccctcccctacttccgattgtgatttttcatcgcatcgagacacccacaggtacagggtcctagtgtctctaacaccaactagaattaatggtattgattttatgtactaaattgtcatctgttctacaggagagacggcagagtttcccaagcacaagcgagatcaaggccacgcataagctcgacaacagagcgtgcaacatcacaagctcataaagctcaatggatactctggagcacgctgaagccaatgagctagaagacgatgattactttcttcctgacgaaggacctcttcatgatatgcacttggctagtgcaatcaacttggatcagatacaggagttgatgtatccagggactataaagtacaagatagatattccctattatttaagggatgagtacatgctgatagaaagtttgtgcaaaggagacaagatcaaaatggagcttggaatgttggctccatctttgaaactgtccaagcctggaggagaattgtcaaccatggatttacctgcatataaagaaataggaaaccttgtctgtcaggctttgaggaatagggacatcatgattcctatctccatgaatgatgtggcgctgaagctcccaggagtaatagtctacaggtcatggggtatagcatttgcagaattgttgaagattatatgcacaagagcagaagtgatgaggggagggtctcagcctgtatatcaaggcactggaattgaagcaggtgcagcacattgtcagtttcaagtcaacggcaattggtaccagatcgttgcgaggaagaatctctcaacactatatgacaggcaagagaatgtaatgtatataggaaatatacactcattgcttttgctaatggataccatcggacagaggatttgtttaatggttgccaatcagatagcagaactttatgatacacctggatgggttgatcaaggaaaaattgaccaaatattatcaactggagatgacattctggaagaaatgggaaatgatggatatgaaacaattgctatgtttgaatctcttgttataggaaaggtgttgagagcaactcccgatgacatcacagaatgccataagtttttgtacaactgtatggatgaggtagaaaacatgctactaaactctgctatgagaggaagaatcattgaacttgttcacagatggttggccatatttgacagtttatcgatcaaagagttatcaaatgtcttttgcttatatcgatgttggggacacccggttgtaaatatctatgaagggatggagaaagtttacgacatcggcactgaagagaaagaagttagcccatgggtagcaactgacatattgtgtcagttcagaaaaactttcttgataaattattacgagaagcatcactactatccaaacgtcttgatatcagaagaggtagaaaactcatatgttgctcaatgcattaagaagggttcttcaatagaggagatgtatcctacttatgatactaaggacttcttgggaatcgaaatccagaagatatgggacattccaataacatttgacctttgtcacattcttaatgataaagcagtatctccgaaccagaaggagctaacagacagtgttgtcaggtaccaaaacactacaggaggtcagaacagaagagggctccttagatggttgagaggaaagagcttaaactgcagagagttccttcgggagatagatcagaacgggctccctgaggatgagtgtatcattggaatgtacgagaaagagagagaaatcaagatcaaagccagaatgttttctctgatgtcagaaaggatgagatattacttcgttttgacggaagaccttatagctaagcacgtgctggagctatttcccgcaataacaatgaaagattcacaaaatgtactccaaaagaaattttggaccgttggcggaatgggaaaagactccacattcgacgttaatatcaacatcgatttttcgaagtggaattcgaacatgaggaatgaattaactcaacccatgttccaacagttggataagatcttcggatataccaatttgatatcaaggacccacgagatatttgaatcatcgtttgtatattcatcttcaggcaagtatgttcccactgtaaagtttggaaaactccaagaggatcctcctatggcatatcgtggacataagggaggctttgaagggttgagacaaaaaggatggactgtagctacagtatgtgccttatctgcaattgctgagagaagaaatgtgagaacaaaactgatgggacaaggagacaaccagatagttagaatactgatgcccacccagagatggaaatcaaatgagcttactatcaaagaaatgatccaaaatgccaaacagatccaaaaagcctttgtaaccgatatggagagaacatttgaagaggctaaattgcctatcaaggtgagagagacttgggcttctacgagactatttatgtatggaaagatgatcctacatgacggagatgcgatgccccaatggttcaaaaaagtgctgaggtcatacgctctaaccaatgagggtcaagtcactgtagcaggggtggtaggaactattgctactaacatggcttcagcggcaggattgagtgaaatgcctgatgtcatgtatctcatatttgtagcaatgactgagtggtcgctcggttacttgttagagtaccacccattcacacggaaatgcatcctaagagaacatgagtaccatgtaaagatccccggagcacatagaggaagagattatagggtgaggtcagttaacaagagaagattggtagtttctatgatcctgataccaacggcagctggaggaagtgtaacagttcctctccctggattcattatgaggggattccctgatcacgcctcagaggcttatgcctggatcaagatgcttgcggaagtaaagagtccatacaaaacaatgttaaagaactggtacactttcatcgggaatgattctatccaacctgatatgttgatccagagcccgtcatcaatcaacttcttgaagccgccaacacccagctttcaagggagaatgaacgtaagagagctcttattgtctggagaatttgatcagaaccagttcatcaaagaagcaggaacaatattgggagtctttgacaggaagaaggtctgctctgcgatgttaacagacccaatgaaccctttcataacctcagaggtttattccacttatgcccatgtgtacatagacggagtgataaaaagagtagaaaacaccagtactatcaagaagttggcccaaaaggtgaaaaccaagactcaagtcattaaggcaatgatgtacaatgaacataacttcatcatgttcataagttggagagcaatgaaaagaggtaccatcgactatgattgtgcaacccagcaagctagaatggctaggaatattggttggggaagaacaattactggtgtgaccacacctcatccagtagaattggggattggtcatatatgtaaaggtagacaagatgaatgtcctccaacggattacatttatgtcagaataaatgaaaagggagaatttgtcccttatcttgggtcaagaatcaagtgtaaagtcgtatcagagcaagatatagatgccagaagagagccactgattgctgtgggttcgcgtatatgcaggtactcgtcgtggcttggaattggcccaaatctgatggaaattgttgagaaaaacctagctgttgtctgtgacacatctgtctatgacaaatttatagacgatgatccaaagggactgttgtcatcaggatctattgatcatagattcactccagcaggagcatctgagggagttttcatcaactatgcaccacagattggttgtaatgtgtacatgtcgagcgattgtatgccgacctatggaagaggccagaccaactacactttgcacttccaggctctatattgttggctgcaatacatctcatcaaggagggctgaaagtgtattcatgcatcatcacatagagtgtgaagattgtgtcgtaccaactactgatgaagtccccgacatccagtgcccctttccctatttcgataatatatatcccccaagagtaagggacagcatatcaagagccttgggattcattgataggaaaggaggactagatattatgagcaatgtaagatcattgtgtcatgaagctgaaccaggcatgtttgatgttagacaattgcaaaagggagtgatgtggacactagcaataaagatcggatttcgattgtaccatgggggattattcgggtcagatgataccagagttgaggaccttcaggagtatcccaggatttactcatataaattatacagagataccttactggtcaatgtggcacatgtgatgatgatgcttgcagccatagagatggataaggcacctgatggtgaggaactcgcaaaagtcagaagaagagcaactgataaactgttgtcgaaacccattggaagcttcaaggggttaggaggattaactctaggaaggactgatgagaatccagataacagtcatttgtttatgactggctcattcccagaaactgtattctcaatattgaatacttccaagactgcattaatagagacaattggtcagattggacgcttatccatcgaaggaatgggccatcttcctgtggccaaaggttctctgtccaataagcagtttcgatttctgataatgatgagatgtttgttagaatgcaggaactctcattactttcaacactttcagaagatcccagaggacgaaccaggacatccagcggaccctcaaaatgacgtttatagaatgcttgtcaaaactcccgttctagatatgagtctagacaagatggtcaaatcacttgctgttattaacgaaagaaagactcttccgataatcgaatggaataacatctccttcgaatcaacagaagtgatctgcaggacaggaactcccaggtccatattcatcggaaatagaatgatcgttgagcaaaatagtagaagagagtacagagaagtaactcttccaacatctagcatttacaagtgggctgggatcttgtttcacaaacccttgaaaagacatatcattgtgttgggagatggaacaggaggaacctcactgttggtgaaaacattcaatcaagactctacagtgtacccttgctcctatttagaaacccataagattattccccaagatatggaatgtttaatgcctcaattgtctagaggatatgagggaatctccgggcgagttttgttaaatgttccagatgatatcaaggatcctctctggtcagaaagaatgtctagtgagataaatgacatgggcgttgaaaggacctctatagtctgcgatatagagaccgttgggctatgtgttctccttgatgcattcaggagtttacctcaaggagttcaagtagttatgaaaacctatgccaaagatatattgactaatatcatgtcaataatgggcttgaatcaggtagaggtgggattttctccgcatctgaaccagagcaaccatgaagtgtttctaatgggacacatctcacagaattcttttccagatcctgacatgatgatcaatcaaatggtaaagctttatggtaaggtgagagctgatccaagatccagaatcctggaggaaatgaggatgataaacaaagtattcaagccattaaagaatacgtctgtgtctctatctctagctcatataaataatctgggaattactatgaccagggagatattacaactggatggacttgagatctggggatatgcactgcaatttgtaaatcgtcattatgttgacccatctcatagagcatttcttgctgacaagaaaacgatgaacaggaaaagaaagagagatttgacaagggcattcaggatattgctaggagtggttgtgaatccaggatacctggatataaaacgcaaatggggtattagaactcccaaggaattcaaaccaagaggaatgaaccttatactagccagagattgtgatgatatgggtgtcaaattaaccaagaaggacaaattggcctctgaatgccttcattgcttttggaccaggaagatgaggaaagctcctctagatgcaccagatccaccgggggaagattggatggaaagtgcaacaagagttcgatcatttgccagcagtttatctgagcactcttctcatgattacatcaatgtcattgagacagagtagtaagttgttagtttccgtttgatgaagatggccagcagggtagaagaaaaaactatcaaacttggatacaagcagcagatcttatataaaacatagtatcattcgtaattattgcaccagagatgaatctaaatggcgaccctgtgacctatagcgtcattgataacgcggtcagattgcacgtggaacgcagcacgtatgggtttatgtttgaggcatgt

SEQ ID NO: 768 - DNA, 11988 bp, Maize suscal virus
  source 1..11988: mol_type = other DNA
caggagtgagtttgcgtctcggttaacgttgttgtagccgtttgagagacaacgtatcgattccaacgccatattcttctcatactcatcaatctcacttgtcctctgtccgcccagacaccaacacaatcgaacatttcctctgatggctgaacagattaatcacgcagctccgcccaggcgacagccaagatggggtgcttcagctatgtcgaacttcagggtaaagacgaaagatctggctacacctgactctgcaaacactccggcccacatgattgggggcgattctcttcagctggtcttcacagataaagaagcccttactggtagattctttcttacatgcctgactctcgccaatgatgaagctgttactgcaccgcagacaatagcctactatttgtctgccatggctattgtatttccttcaatgaagcctgatgcccaggactggattaagcacgcaggttatcgtgttgagctagtagagactgaagaagatctggctgagatggaagaaatccaaccatggaggccaactccagagctagctatgatgtttgggcagtctgtcttgattgtgttcaagaatatctctgctgcaaattatctgacgtacatcagaagcagagtgaaggcattaaaagcccatgtgggtgcgttttctgattctattgatggtggagaagtcttcagtctggctaaagcaatggttatcagagctgcacttggaaacaacgtggagttcaagaagaaaatactgaatctcatgctggccactcgcgaagtcgctggagcttttccggcagcttgcaattatgtgtgtggaatcctggaatggaatgagatgacggcgattgtcatcatatacaagatgctacttctcaccagctcgccggtcattaatgataaggagatcagagatgaggtgcttcacctggctgttgcgtatgaaaagatcaaccaatttgagtatccccagtactttcgcattatggcttccaggagtagagcaagggtcctagagaggcatcactatcaggtcctcaccactgtcgctcaagtggcccagaaggaccagacaccatctcttgcccagtttgttgccagtgttcctgaaaacaatcttactgtgattcggctggtcaatatccatcgtcgtttcctggccaggactgcagaagacatacatctgaaggctgcagcattcctcactgcagttgaagaagaagatgttgatgaagaactccctcctcgtgcttgattaggacagtgaggttatacccaacagacatctaagctggtctctgcgatggtctttggcggctgagcgcctttttgtttttggtctacctcatgctttctcttttgctcttggtggtgagcagtcatctattagtctgtgagtcgttggttaatgtctcagtctttaatgctactagaaaaaagtgagaaacgacgaacttgaaagaaaaaatggagcggaccagcaagctagagcggctcattgcgtctagaagtctctcattcggagaagctttgatcgctcaatctctactaaactgtgcaggtcgagatcacttcatgtcatgtctgggagacactgagattgtgtttgtctgtaaccaaggagttgacccatctctggtgagaagactaatcaccaattgcaccaagaggagtgttgtgcttccatttcgcttacttgagttggccacttgctcgatactcacatccgcgggttatgcagcagcaactctctgtagtttaatcaacaaaatcctagctgggcgtgaaaacaggtttcttggagtgatgtacatctcatctggcattaacttcaacggcttctcatctccaggtgttttggcatggaccctccagtactgcggaccgctgatggtgagatctcaaagcgccagaaagacgcttggtctagtgttcgttgactcccaggtgtacagaacttccacagcctgtgtctttgtagactgccagtgggaagaagagattctgagtctaaccacagtcatcgaacgagtcaactcacataccatgaattatctgagttctgttgaaggcaaagctattttcaagcgtgctgccctagctgtttgcgcctatttcaatagtgctgcagactggtgaaggtcctggtgtaggtgaataaagtaagaagatagaagactgtgcacatgtaggagattcccctaataagggtatgtgtgatatttgcatgtctaggtagactgaatgtattgtaagtttgtcgtgcagcccacagccaacctctgatggcagcttgttgtctaactttgagccttcttggcagttggactaagaaaaagtgagagaccaagcgattactgtgtttctcaaccttgcgaaaaccggagctagttgacagcacgcgtgagttcaaggcgcaaactgcaatggcgagcggaagtgggctttcaggtcttacgagtgaaggtgtcgaaagcagaggaactagtggggatttggaagagctgccaggaggagggctgtccagagaagaattcgccacaggaggacaaaatttattggacattgctactcaagaccctcggtttgaccaggtcagggcacaatttgctgacggtgacgatgaagagggagacgtccctaccaatgaaaacacgttcgtgttcgggaccttttctgggtctccatctgccacccagcatactcaagccagggtcagatcaaatccagtgtttaaaaagaagagtggaggtgcaaatccatctgcaagcagcagctcagcaccggtacctccggtcgcagggaacccttttgggtcaccgcagccatcctcaggattgcctgctcagcaaccgcagctagcacaacagcccccaatgagtgcggctgctgcagcaattgccaagatggaagagcagatccacgcaatggtggctcaagtggattccactttgccacacggctacccatcggtggagtcagtcacgactgacactgagcggctcgctgcaatgatagctgacactccttatctttgccttgagacaattgattcgaagcatgttgtggcagctggaccatgggtcgtcaagataagctctgcccagctcaccctctctgcatatgaccagctgatcttgtctatcgctgggaggtactattcttgcttaccgatggcaccagcagatgatctcacagcacgatttttgcacatctgctcgcgatacggaggaggagaccaattcagatcgcaagaggtcgatgtggggctgaatgcttactggaatgaactgtcaagcgagggagttatccatctgccgactcttgcttccaaggttctgcttactggtgaagctatcgcggcacctcactattcagattctatgactctcgcagatctgaccaagagtttagatgaggtctggcaagtatatccaccgattcggacagtttataacatgtgctaccaagttgcccatgaaggattaaagtttgttagtcctcttcatgatgccttcaggtttaatgatgctgcggctttttatgtggaccggatagcttgcggttctgactatattcgattggagcatgttgtcattacaccaagggcatccaacctccaattcaaacaacctgaaatgcctttagttgtcccggtggcaaacccgccaccagaagcggccacaggagcaggagacatagctgcgcagacagcagctgcaactgggctggtctctgaaaggcgcagaaattctgcaagaactggagctgcaacttcaggcgccactgtgccgggatctggcactggtgcttctttagccgctgtcaatcaagacccagcgcagcctacccctgctgaccctcatagtttgctgaaccaagggttgcctgcacggcagccacctgtgcgagacacctcgaccttcagagatggtgtagtcgacttcaacggtgttttggttaaagttcatcagttattgtcaaaccaggcctcccaagatgcaaagttagaccttattatgcagaggctcagcaacattgaagccatggtggatggggttgacaaggcatttgctgcagtgataacacgccactcccgccaggatctgactcaccgccagacagtcaacagcactctgctccagccaagttcttcagaggcccagaatctcgccagcgggtctactccccctgctccacctcagaccaatcaggtccttgaaatcctaaagatcctggaaggaggtcatgccgacgagctgacccttgagctggttgctcggttgaaggctcttattcttgagaccggaaataccagggccgctcagaacatcaccattgagtcgatcaagtttgagaatgctaggaagaggactgttcagaggatcaaaagtctcttccaccttaactaagtgatgacctggtcagggtgtgggaattgctgtttcactaagcaatgactggtcaaataaatcagtttgagtcagtcggtcctaggtcgtgagccaagtgggtcaagtcagtctagttcctcagttcaagtcgtcgagtcttgggttatgctttggcagcccttcaaaaactagaaaaaagtgagagacttgagaataactttgccatcgtcctcctgcaacagctgagcgcactcttctcgccatggagacctttctagatgaacaatttgatgatatgctatctgaatttgagcaagcacggctgtctcggtttccagcctcacatcacagctcggctttaacatattatcctcaacgccatattctgtcattaatgtctccaaactgtcctgtgaaaccaactccccttctgcgggcatactgtgatgcggtcaataaagtatctgatctcttggggggtgggtgtgatgccacagacaacccagctccagtatactcttatatcttctctcagacaacggcttcttcgccagcctattatgacccagactatgaggatccatacctgctggattccctgcgagcagcctcagatgctgtgcttgaagatattgaagctatagaatctcatcatccgggtttttcgctggataaccagaagttgcgactgctgcggaaagtctcttcacgtctccatgcttcctgcaaacagatatttgcggtgcgaagaatgttagaaaaagttagaaatcaaatccagaaatgtcacatcggggttgatcacaagcttatgccagcagtgagattaggaaatttgagtatacacactgttagagatctcatcttcgtagccggactgcaaccattccccatgcgcatccatatactaaattacgatcagtggctaatgatctacgacacagtctgttgccgtgcaatggtaaaggtggcaactttatggaacgaggaattacgcactgacaatatcccttcatgggagatcgtgtcctcagtttataaatggggcgacgcacttttaaccaactatggtgtctcagcgtatgctattataggagaatttgaatcaatagtgactggtgtcttaattacgttttctgacactgacacactaggacttggtgcctcatttgtcaactcaataatggagaacgcgcaagagcaaagcagagcttataatatacctgcgaatgagacattgaagctgatatcattgcttagaactgttgagtctgtgaactggctgtcagagttgttcggtttgagaaagcattggggaaatccaatggtggacgcgcgagcatcgggaaaagcagttcaggagaaggtagatgaggtattgccagttaaagggactgcacttgtgaaattattggcatctttcaacaggatggttacactgtcattcatctctcagcatgggcaatggccggacggttactacctctcgaactcaagagactgcccgctgaaaagagccttcgaatcacggtctacccgtatcccagagactgtggaagggcatcgtcatgaagactgggcatgctttgtgtttctacccaactgcattttagactcatatgaagatgacctggcattaatatcagataaagctgtcagtgtgtaccgcgaacacttagattcagtctatgtgcgggctctctgtaataagcagagtcagggcacggttgaggaagacagaaggttgatgttagagtacttgaggaaacagcatatgccaatactggatattttcaaaatagtaatgacagacgcagtgccgccccgatggatggccaactgtgctagcatgaaaggaacagaaatgaagcacttgaaggcccgaatttttgcggtgcttacatatgagatgagacagtactttgctgcgtcagaagacatactgaagaacaacttatttaagtataacccgcatcagactatgactatgtcagaaacagagctattgactcgactaaaatcattaactactcaattggatccaaacagtcaaagccggcagctgagtgtaatccatattgttgatttttcgaaatggaatttgagaatgagatacactaatacatgcttggtattcaaatctatagacgatttcttaggaactccaggcttgtttgagaattctcatccactcttcagtgatatgctcaacatggtttcagacccattcaatcctccagcgttaggagtagaagagacagaatctgacactatttggagaaatcatcacgcggggtgggagggtcagcgtcagaagggatggacaatcttaacatctgcactcttgtctgacctggagagaacaaccggagttcatagtgaaatatgcggccaaggtgataaccaggcactactaagcaaatttcctgtccccactatctataggaatccggaagaatggatcaagagtgatcctacggaggttaggaaggtgcttgacgacttctatttgagattagaaaaggaatgtgaagctgtaggtctgaagataaaaacagctgagacctgtcgaagtctttgttttttcaactacgggaaaagactctatttcaaaggcagtgaactatccatgaccctaaaacggttctcaaaaaacataacccagcctaatgactcatacccaacaacagaggctattcttaagacatatgagggttcatcttatgcagctggcctttatagccatccaagtctgctgccatactggatgagtaaattctctgtagcccatcaattattcaacagcttcactaacaaccagctttgtgcagaagccccagtacagatgatgtccacctttgggttcccgatcaactaccgactgatcagcacgttgatgaagatcccagcatctctaggtggcccacctcagcagtgtctggctgattatctgctacgcggccatccagatccactatgcactgatttagtcgggttgacattgaagtcaaaggccgggtgtgtgatctctaagaagataattcgtctagctcaatctggtaaatggtttagccaacgcactctgaccagagattccctaatcaaatctccttattctctgaacctcagggtcccattatcagttcgacaaccaattgaagaggctgtgctcccggctgtgcgagctcactgcaacaataacttagtgaaatctctatttgatagctcgatggatgacgacgagagatatattcttgactctttaggtcttatgaagccgttccatccgctcgtggccaacgatatttattcaaggactttaccaggaagaagacagatgtttatatcaggactggcgaataccacgagcttaggtcgcctgattaaagggaattctgcgtttcctctgatctacaaagtcatggatttggagatggagcagctaaaaagctggatagtccagctaacagagcttctcggtttacctgataatgatgatattattcttcctcatcatatattagcgcaacagctgcgcgagaaatcgtggaatacagtcattgagggcataacagttccacatccgttagaacagttcatgcttactctatcaaaatcggacgtctgcaccaacgactgttatacagtagaacctgagcatattgtattggttcaacactccgaggatgtggttgtgtctcccggtgtggaccgtgaccacatcacagcagcgcggtcaaagaaagggagcccctatcttggcagccatatcggagaaggcattgtacagaagcagcttatttgtctaaatccagatacttcctggagagatgtcattagactaaacactatcaagcgttgggtggctccagaggggtctaggctgaggttgtttatgaatggaattataagctcgcggactaacatatctcgtgcctacatagatctcgccacaggcgttccgagtagattgtcttacaaccaccgggccagcctgatggggtcaataaacagctgctctatcagttcgaccacaaacatgcacacaaggttgtacttatcctcgaacagaatgggagattattctcatggtttgaaaaattatcacatgcctttcgggcccacctttctctgttatcagacgctcgtctgcttgatcgggatcttttcacctgagaaatgggcattccctagaaatgtttatcatattcatgtcagagactctagggtgccgccggtgtacgatggcgggttagagctagaagacctaactgtccttgatctgaaaggacacccgcctaccatccttaggtgcttagcctccaaactggtattcgaagcagcaccaggatatgcatcgttcggattttggtgtgagttcgaaacagcatcgaggactgatgcgaaatatgggtatgcccaacagctgacgggtggtttgttcattcaggagacggttgtaagagaatctataacacacgacaggattgggagctttgcatcgagaccggctgtcatatcaattggagacatctcattgatcgagccatctctattccttcgttccatcgcctggggtatgctgttgctcgcacctatgcatctgctgcatttcagaggcaaatatgcattcaaagtttcctgcgtggaatatgtcaatcttttcagccgagctttttggtcttcatttgaatccccaatgagcaacccccgaataattaggaagctcggaaagcatgtcgcgttgatgtctagtcatagtctaggtaggctagattccggcatcatcccagctctgcagataataatcgttgaagagatgtggtgtatcatacattcgatcgccacctatttccgtcgaggaggtgataaaccgaatatcccccccatctttgccccatcgggttctgctgccctactcctcacctcacgagtgatagaaatgatggtcactatacggctagtagttgggaactgcagcatcagtaagatagtagggttcccaagagatttctcggcaaatcttatgagtgtgccgcagccaatatctgccgcagctctgatcgtgatacaacatgacttcttagaattgcagcgtcacttgaaactgccattacgggacatggtgatacccagagtgttctcaacccattacccctgggttgatatcttaaggaagactgacagtgtggaggcagacgatgaagacccgcagaggcaattagtcctcccagtcgactttccgcagtgtgctaatgtagtagaatttcgtatccctgagaaccctgtgttggagactactccacaatgtgactgtaaaacgacacaaagaaagagagatttacatgatgaatgtttcttttcgctgagtgggaactatagcaaatcccacctcaaaattctggagttgatcttttcgttccacctgcctatagcaaatctctgcgtgcttggctctggcactggttctgaagcatgtgcgttaagtaattatctggactgcagacaggtttatgtgaattgctaccacaaactaactgacttctccccgcatgctgcttccacttatgttccgcctgcattcaggtctgatggtatagtgactaagctcgtctctccagcctctgctgtcctaagtctgtcagatctcacggacatcaggactgcggatgctatatatcagcacttaagaggtattgctacaactggtatcatttgcgatgcagagattccaagtgcagcaactcctttactctactcacagataatgcatacaatagtggcagttgtgaggaagaaagcctctatcaactgggtgttaatcaaagtgccgatcttctgtgttcataagcttcttggcctggcagctccactagctcaggccttccatagaatcatctttgcttatccagacttcgggaagcctcattcaagtttggtctatattgtcgctactattcgggctaaggcaactccaattgaagagaataggctgcctactgtaatgcttgaagacgagatgctcagagagatgttggcctctatcagcagtcagaaccattgtagattatatgagatgagggtagcggatagaataagtcggttaagccttaatctaacccttcctcaaagcttgactgtggcttcgaatcggtttgtgcaaggcctgatcctcactgaagacgaaatctccgacccggaacaagttataaaggtactgaaggctgtgaggcaagggttgttgacctcagcacagaaagtagttgaaactcatttccgagttcataatgaaatcacaatgccgaggtcagctgtcctctctgcggatttaggaacccttcacggacagttaaacaacacatacctgaaagtcgctaaatgtgatctgctgttagagctgttgcaccttattcatcctaccctcgaacagatcaagaatcgtgtgtacagctggttggctacagcccactcgtatagaatgagaaacaggaacttcaatgtctacatcaaccagaccagatttatatcacatgattctagatatttattcgaaatccttggacatcttatgaaaagatctgttcccacagttggactccccatccatatggattaccatttattcggatctaggacactgaggcctaagcaacttattgttccttgcccaataggcgtatgtcgaagtccatcaggtagaactagcaaatggaagtggcagaaacgaagtgagatacttggttgggcaatctcattaaccctcacaaatttaccgatagcagttgaggatcataatagcttttcgctggatttcctacacgaaaaaggcatcttagaagatgttcgcatgatggcctcattaaacccatcccgcatagaggtcccttacttctttaggcccaatgagatggccctcgatttgttggcgcatgaccggttgttccttgttgcgccgttgaattctttctcactactcagaagccgttacacaaccgttgagccatactttgttccttggtcgggggcccctttagcttggtgtctattttatctggaggagcggaaccaaattgatagcctgattgtggatgagatctgccttgatgatactctgtcggtcaacacttatgtcgacacagacagcatgtcctgtagatgcctgagctgcaaaacggaagaagtcttgggagagaggttttcgttaaataccaacgatctggatttcctgtgttctcttggatctatagagacagtctatgattctgagcatgctttgtaggggcttatcgctcgcagggactaataaaaagtgagtatgtgtaagctgagccaaagactgtatcgccagttttatctaaaagtttattgtgaacttaatttaaagttcctatctgttcccatttaataccattaagaatgtggtcccagctcacctcttgtctagtccaattaagctgcagattgtgttgggtatgacataggacatatgggagtgacaaagttgaggtaataggagaataaaagtggaatcgacagtagtatcggcttgtacaacgttgagcgagacgcaaactcactcctg

SEQ ID NO: 769 - DNA, 76 bp, Tomato brown rugose fruit virus
  source 1..76: mol_type = other DNA
gtatttttgttttacaacatataccaacaacaacaaacaacaaacaacaacattacaattactatttacaactaca

SEQ ID NO: 770 - DNA, 13 bp, Celery latent virus
  source 1..13: mol_type = other DNA
aaaatttaaattt

SEQ ID NO: 771 - DNA, 235 bp, Black grass varicosavirus-like virus
  source 1..235: mol_type = other DNA
cgccaatttcaaccctcccctacttccgattgtgatttttcatcgcatcgagacacccacaggtacagggtcctagtgtctctaacaccaactagaattaatggtattgattttatgtactaaattgtcatctgttctacaggagagacggcagagtttcccaagcacaagcgagatcaaggccacgcataagctcgacaacagagcgtgcaacatcacaagctcataaagctca

SEQ ID NO: 772 - DNA, 142 bp, Maize suscal virus
  source 1..142: mol_type = other DNA
caggagtgagtttgcgtctcggttaacgttgttgtagccgtttgagagacaacgtatcgattccaacgccatattcttctcatactcatcaatctcacttgtcctctgtccgcccagacaccaacacaatcgaacatttcct

SEQ ID NO: 773 - DNA, 200 bp, Tomato brown rugose fruit virus
  source 1..200: mol_type = other DNA
gataatcgagatgcttaaataacagattgtgtctgcaaacacacgtggtacgtacgataacgtatagtgtttttccctccacttaaatcgaagggtagtgtcttggagcgcgcgggacaaatgtgtatggttcatacacatccgtaggcacgtaataaagcgagggattcgaattcccccggaacccccggaggggccca

SEQ ID NO: 774 - DNA, 583 bp, Celery latent virus
  source 1..583: mol_type = other DNA
ttttattatgcaacacaacactctttttgactggggggtgatgtgtctggacttgttacagtctttttctttttcaagtgatgtggaatggaccttgaatcaaataacatttgattttggattcacatcattaatcttcaatagggtggatggccctccccttttggagtcgtacaggacgtatcctgttttatttagtaacatagcaataaacacaaaccaccatgtagatagccgtttcagtggtttggttgtgtgtttttcatttctgtcagaaaacttccaaaaatacaaaaatataaaatttttattttgtcattttggttcgttgggcccaagcgtcttgcatagcatgtcgttcattcctgaaacgagtcccccgatagtttcacaattagtgtaccggacaccttttaaaatcattttcacactttgtgatgaatttgtaaggcgtgtgcgcgtgaaaccgtggtttggacctttggaaagaggctacgctctgtaggtagttttcgatagaaaatggtttcccttaaggaaactgttttgttactttggagttccggcccccaaagtaaatttt

SEQ ID NO: 775 - DNA, 221 bp, Black grass varicosavirus-like virus
  source 1..221: mol_type = other DNA
taagttgttagtttccgtttgatgaagatggccagcagggtagaagaaaaaactatcaaacttggatacaagcagcagatcttatataaaacatagtatcattcgtaattattgcaccagagatgaatctaaatggcgaccctgtgacctatagcgtcattgataacgcggtcagattgcacgtggaacgcagcacgtatgggtttatgtttgaggcatgt

SEQ ID NO: 776 - DNA, 303 bp, Maize suscal virus
  source 1..303: mol_type = other DNA
gggcttatcgctcgcagggactaataaaaagtgagtatgtgtaagctgagccaaagactgtatcgccagttttatctaaaagtttattgtgaacttaatttaaagttcctatctgttcccatttaataccattaagaatgtggtcccagctcacctcttgtctagtccaattaagctgcagattgtgttgggtatgacataggacatatgggagtgacaaagttgaggtaataggagaataaaagtggaatcgacagtagtatcggcttgtacaacgttgagcgagacgcaaactcactcctg

SEQ ID NO: 777 - protein, 1615 aa, Tomato brown rugose fruit virus
MAYTQTATTSALLDTVRGNNTLVNDLAKRRLYDTAVDEFNARDRRPKVNFSKVISEEQTLIATRAYPEFQITFYNTQNAVHSLAGGLRSLELEYLMMQIPYGSLTYDIGGNFASHLFKGRAYVHCCMPNLDVRDIMRHEGQKDSIELYLSRLERGNKVVPNFQKEAFDRYAETPDEVVCHSTFQTCTHQQVENTGRVYAIALHSIYDIPADEFGAALLRKNVHVCYAAFHFSENLLLEDSHVNLDEINACFSRDGDKLTFSFASESTLNYCHSYSNILKYVCKTYFPASNREVYMKEFLVTRVNTWFCKFSRIDTFLLYKGVAHKGVNSEQFYSAMEDAWHYKKTLAMCNSERILLEDSSSVNYWFPKMRDMVIVPLFDISLDTSKRTRKEVLVSKDFVFTVLNHIRTYQAKALTYSNVLSFVESIRSRVIINGVTARSEWDVDKSLLQSLSMTFFLHTKLAVLKDELLISKFSLGPKSVSQHVWDEISLAFGNAFPSIKERLLNRKLIKVSGDALEIRVPDLYVTFHDRLVTEYKTSVDMPVLDIRKRMEETEVMYNALSELSVLKESDKFDVDVFSRMCQTLEVDPMTAAKVIVAVMSNESGLTLTFEQPTEANVALALKDSEKASEGALVVTSRDVEEPSMKGSMARGELQLAGLSGDQPESSYTRNEEIESLEQFHMATASSLIRKQMSSIVYTGPIKVQQMKNFIDSLVASLSAAVSNLVKILKDTAAIDLETRQKFGVLDVATKRWLIKPLAKNHAWGVIETHARKYHVALLEYDEHGVVTCDSWRRVAVSSESMVYSDMAKLRTLRRLLRDGEPHVSSAKVVLVDGVPGCGKTKEILSKVNFEEDLILVPGKQAAEMIKRRANASGIIQATRDNVRTVDSFIMNYGKGTRCQFKRLFIDEGLMLHTGCVNFLVSMSLCEIAYVYGDTQQIPYINRVSGFPYPAHFAKIEVDEVETRRTTLRCPADITHYLNRRYEGYVMCTSSVKKSVSQEMVSGAAMINPVSKPLNGKVLTFTQSDKEALLSRGYTDVHTVHEVQGETYADVSLVRLTPTPVSIIAGDSPHVLVALSRHTQTLKYYTVVMDPLVSIIRDLEKLSSYLLDMYKVDAGTQXQLQVDSVFKGSNLFVAAPKTGDISDMQFYYDKCLPGNSTMLNNYDAVTMRLTDISLNVKDCILDFSKSVAAPKDPIKPLIPMVRTAAEMPRQTGLLENLVAMIKRNFNSPELSGIIDIENTASLVVDKFFDSYLLKEKRKPNKNVSLFCRESLNRWLEKQEQVTIGQLADFDFVDLPAVDQYRHMIKAQPKQKLDTSIQSEYPALQTIVYHSKKINAIFGPLFSELTRQMLESIDSSKFLFFTRKTPAQIEDFFGDLDSHVPMDILELDISKYDKSQNEFHCAVEYEIWRRLGLEDFLGEVWKQGHRKTTLKDYTAGIKTCLWYQRKSGDVTTFIGNTVIIAACLASMLPMEKIIKGAFCGDDSLLYFPKGCEFPDIQHTANLMWNFEAKLFRKQYGYFCGRYVIHHDRGCIVYYDPLKLISKLGAKHIKDWDHLEEFRRSLCDVANSLNNCAYYTQLDDAVSEVHKTAPPGSFVYKSLVKYLSDKVLFRSLFIDGSC

SEQ ID NO: 778 - protein, 3640 aa, Celery latent virus
MSKRIYTIIVVLCFQVCFQNLRTQPTQSSHTFSTNPAIPGTDALQFEENANLTYSTIKYNILKFNLNYKQSIMSVVSFGSITSMDFDAACLAAMIETPGGSIPPTPQSPPTSPVAVKQRKILNFPIAKIRTTPDASFEMCVKFPESFIDSFCAQAQKELKYWHAAITQLKFFGGETPKTLETLVNQGQAHTHQVILNLVKILDSAPKAIQGKKELENFFQLSPHGNNSKEPIDVSRKVYMEPCKISPRKRQVCSCDNDDDAHYHCYYCDIVCSSKNLLQEHERDFCEDAQSVQAFGYKLESPNVFDPPHVTQQRSVAPSLGKTLESPVKSPEQSKPNLEKSFPLVESSTNSGMIFFGSIATMVPSHIEKYVRNCETENPIDAAASNLAMQEAKSSGAPCIVVHHKALPGGKKDFLFPHNSPQVVRTETEEPIAGTIDRPTIKRALFTRIKKKAQEICVNPGGTIQRKTKRWLRPAEVAQIVRATSDPQHPLFKVDVTQIIEVVHPVYRTERTEVVQQCITRGTYKLMSKAQQRKARAMRSAGMLVITDNPTTHWVSEPQKMLVVKEKLSTTKHVKLRNVEVNAESEMFWGTKTKEGPSKTALKRCKRNIDRLALLDPQMGESANGECWMNTFKHHLKVGSIDILPNKVRLPNLRSAFSRWIPLVDYVEILKFHCKSQPKLKRVVIPTPVTYLEGSRYHIHVGYSKNCSWITVEQLIRQLQTLLTSSKYGEHFKRAIVGGEPEDKFTPVVPIVDVETERAKSSLAKWTTAQQRYMGSIRTRINSQAEKHKIDSEKKIWIPMRHDTMDMLTPPYLFENGLRNNEVQQVGQVLGDSVDRAGNSSGQSSQCQQQNVALASEGNNDNVINESVRSIQNLVTANMQLQEQCKLLLASHEQAIMDSVEHGNLEIQKHDVEVSQKPSTRKSDSQRNLQKFSLKKIVASEEMSRTLGRGWRKSVTSIGVPIVSASIAEALNQVVQRGNTSWLDVGISGTLLKQCTLFATRTFQAYCSYKLARNVLTLTVGELYDNVKSYINSIMGSTDPEVTGFLSQVRSAPSMVKMAILLTMFAISVKLMRKFFKVKNNGTSFTVSGENVSASQLRISAQAQARSTDNMTPTVKKLCSILGMIGLVCCCYDRTTWAYQKDWMDAWITSITYAGASDSIWESISHPFETLHNIAVSGGDRSPETTARLERILAGAGLNAQAQALDEFGASSSVMGQTLQNILDEVESTNVSIVSEMKALPHYHRNATTFNQAARDLVTEPDATYQMLLTAATGTGKSTLFPVHLRSQSQKRVLLLIPLVAATHGVYQRLKSQRVNDIGYHADSISENPNAKLIISTYGHMCVKLLGGQNPFDQFDYILADECHVVTLETVTVISHLLQQREMATWKTVFMTATPFNNITLNSVETEQPVIMQQTEHFHNPKSFVDFLKAGGTERVQTYAKGGCIVFCSTQKETEESAKALKASGVIALFYHASNRLEWDSFAKKNERSMGQLNFYLFATNALESGVTIPMKSCVDFVTKMHPVVGGDRKTITMAPTSISIQEQLQRRGRVGRTCPGGYLYTSVGTPLMYKLDPDSSIKYLLYCWKSGIKCYKEALNIPDECTITFTKEKIGAIWTHDTPPVVTAALVDNFGAVYRNANFFLASHRRNYVEIPHTTDMILPSTLSTWENFELDGNEVSDGTRMRVPQNHFFFRNERVQESWLKLQAAILTELTEAEATKKRDIVIENLMARRVSGHPASKLEIARMIMAKQQVVQQARDTKRVRETLSESISDYSGIFSNFSGIFSVQERLKKASIKANEELDMVIQENESHILFLQDMIKETPEIIPDMALEEQIQHMEYAKAILENGWISGNPQAKLLIMRTTHKNFHDLVTKTKDGTYRMKSYVQRMFDFVKKHPLLIFMSIMMGTSLAAGYFMMSKDSEDDDAIVQDKVFKRNDKAMLEWCLRGKACKCDATHFEAQYVLDSRHYRTILEDWVKFPLRGFHNIQIVNYGTVSKYARALAFLSVCALLANPTMVYNSAAHSMAGNSEYNESVAKSLMHNILRDWNRVPLIDLLVKGIDGSDDRYDQYIHELYTSGGLIAFESDTGKFEGKMSISQYRKDAAKGQTKRSAASRSREEDHYDPRSSGRLKSGIRRAYRQFYNIEDSDVQEIILTNKKGAPILKIGSLDELNQHVDLLKFSDPELYELYLHARDKLDLDEPESSSGFTGKWGDYAEDDEFMKMISALDSLTKQASEEAFIPVQVKLRDGRTVQANVARYWQKDYPTGKSVKQWAQTTWAPPQFTALRERVGKALELIPESRPIHLHGKVPNGTLIEFQDAMKDLHEKTAVKAVAEAKIGDTQFEADPSDVTSRVGVVMVKTSANAEWESWNQCVALNNIVIFPHHYTLKDGNNLRFKFSSSDFESTCHIVDGYNGLDMAWAPINVKIRGLKKKVCLGTPRNGSYLWHFSMINQGKDLPEARLMGYSSVTKVQEESHPSFDWTHTVSTQVGNCGGPFVDKHGVIVGYHTGAFQLGQFNTFLGLSAPLIAHLTKLDVKPSAQPQSKMIWREVDFYRSPNYLPPTINNQEPIPEEWRYPEGKSVYPCVDPGWMGSRLVKGSGFRLIGKMQRHVEYSTKISLNEHFDMWMSQEKTQNELTRLNKNRVEKGLEKAFISHTIAAQNKEAAIKDTSKYARTTLGTYSEPLLKRATALTIQMLEEHIKLCKRQPLDLVYGDMEWNTACGAQYNGLKSAFRDQVVGIENMDAYGQYCWERFNVPTDQYKPCIWTNSLKDELRPIEKVKENKTRTFTAAPIEFVIGAKQAVDAFNHQFMDAHLKLPHTVGINQWSGGWHKLYKKLYGKNFVYSSGDGSRFDSSPCFYMFDALYTIRTYFADPEIHQVLENIYLEVCHTPIVLHDGNVVMKNHGNNSGQCSTVVDNSLIMMILCCASYLEHTPATMHSLDAIKSHWHFCVNGDDYIGGMSPLLASHLTKEKMAKTFSDFQFIYEWSDYSPSLFEQDYMSLKFINIVERKGQTTGQQLIAPWREASRQLSTLAHTSSGAPEIKLQVALTERVKAWVDKDLFDFITEYCRWLVEYFDRFTNTQAWNEAKKLWWDEQQIFNHYFSFESICNAPYSQIVNETPDEFFANGVRESRPLRILRDGIKFGVAVTAANYLGPSDHDVPMIANTMLNVAKIGLANSTAERIDRMLFGKENPEHSRADSLVVVKTEQTDATICLRTHCKCQAQHFDGKYECWVSSPSVAIKMFATLKPRILSTTKFVGVKFLPKILRAHVWALYLSGFSWEETMQIVQSHYPGEKQQRKADWFLQQLLKELVLIFKVKGSKFIELGEHAQVQGKTQLDSTQVDMDPNFNAAAYAATLRGGPHWGTHNSQGLFDAIKVLNPNAANVDIGNARTAVQREMQRLIAADAPRQQPPPQVGGGHQQPPPAGGQTQGQPGGYTPSQAFTNKFGNIMAEPDAPLVLDSQATMREVAQIEAAWARLLEVQSLEGLGSFWNYMFSYVGNNGTSSGGDPRDYIPAGNGRVTLAQLKSKAQGEQWRRYWRSHASDMRDFLRLLQASDRPLPIRWARNNGIKDANYEIAFDFADALPDLSAAQMSIILAAKNLAVRRGQGQMLNAGTKVGGRSRTETYDQAVRDAADVQFPGA

SEQ ID NO: 779 - protein, 2031 aa, Black grass varicosavirus-like virus
MDTLEHAEANELEDDDYFLPDEGPLHDMHLASAINLDQIQELMYPGTIKYKIDIPYYLRDEYMLIESLCKGDKIKMELGMLAPSLKLSKPGGELSTMDLPAYKEIGNLVCQALRNRDIMIPISMNDVALKLPGVIVYRSWGIAFAELLKIICTRAEVMRGGSQPVYQGTGIEAGAAHCQFQVNGNWYQIVARKNLSTLYDRQENVMYIGNIHSLLLLMDTIGQRICLMVANQIAELYDTPGWVDQGKIDQILSTGDDILEEMGNDGYETIAMFESLVIGKVLRATPDDITECHKFLYNCMDEVENMLLNSAMRGRIIELVHRWLAIFDSLSIKELSNVFCLYRCWGHPVVNIYEGMEKVYDIGTEEKEVSPWVATDILCQFRKTFLINYYEKHHYYPNVLISEEVENSYVAQCIKKGSSIEEMYPTYDTKDFLGIEIQKIWDIPITFDLCHILNDKAVSPNQKELTDSVVRYQNTTGGQNRRGLLRWLRGKSLNCREFLREIDQNGLPEDECIIGMYEKEREIKIKARMFSLMSERMRYYFVLTEDLIAKHVLELFPAITMKDSQNVLQKKFWTVGGMGKDSTFDVNINIDFSKWNSNMRNELTQPMFQQLDKIFGYTNLISRTHEIFESSFVYSSSGKYVPTVKFGKLQEDPPMAYRGHKGGFEGLRQKGWTVATVCALSAIAERRNVRTKLMGQGDNQIVRILMPTQRWKSNELTIKEMIQNAKQIQKAFVTDMERTFEEAKLPIKVRETWASTRLFMYGKMILHDGDAMPQWFKKVLRSYALTNEGQVTVAGVVGTIATNMASAAGLSEMPDVMYLIFVAMTEWSLGYLLEYHPFTRKCILREHEYHVKIPGAHRGRDYRVRSVNKRRLVVSMILIPTAAGGSVTVPLPGFIMRGFPDHASEAYAWIKMLAEVKSPYKTMLKNWYTFIGNDSIQPDMLIQSPSSINFLKPPTPSFQGRMNVRELLLSGEFDQNQFIKEAGTILGVFDRKKVCSAMLTDPMNPFITSEVYSTYAHVYIDGVIKRVENTSTIKKLAQKVKTKTQVIKAMMYNEHNFIMFISWRAMKRGTIDYDCATQQARMARNIGWGRTITGVTTPHPVELGIGHICKGRQDECPPTDYIYVRINEKGEFVPYLGSRIKCKVVSEQDIDARREPLIAVGSRICRYSSWLGIGPNLMEIVEKNLAVVCDTSVYDKFIDDDPKGLLSSGSIDHRFTPAGASEGVFINYAPQIGCNVYMSSDCMPTYGRGQTNYTLHFQALYCWLQYISSRRAESVFMHHHIECEDCVVPTTDEVPDIQCPFPYFDNIYPPRVRDSISRALGFIDRKGGLDIMSNVRSLCHEAEPGMFDVRQLQKGVMWTLAIKIGFRLYHGGLFGSDDTRVEDLQEYPRIYSYKLYRDTLLVNVAHVMMMLAAIEMDKAPDGEELAKVRRRATDKLLSKPIGSFKGLGGLTLGRTDENPDNSHLFMTGSFPETVFSILNTSKTALIETIGQIGRLSIEGMGHLPVAKGSLSNKQFRFLIMMRCLLECRNSHYFQHFQKIPEDEPGHPADPQNDVYRMLVKTPVLDMSLDKMVKSLAVINERKTLPIIEWNNISFESTEVICRTGTPRSIFIGNRMIVEQNSRREYREVTLPTSSIYKWAGILFHKPLKRHIIVLGDGTGGTSLLVKTFNQDSTVYPCSYLETHKIIPQDMECLMPQLSRGYEGISGRVLLNVPDDIKDPLWSERMSSEINDMGVERTSIVCDIETVGLCVLLDAFRSLPQGVQVVMKTYAKDILTNIMSIMGLNQVEVGFSPHLNQSNHEVFLMGHISQNSFPDPDMMINQMVKLYGKVRADPRSRILEEMRMINKVFKPLKNTSVSLSLAHINNLGITMTREILQLDGLEIWGYALQFVNRHYVDPSHRAFLADKKTMNRKRKRDLTRAFRILLGVVVNPGYLDIKRKWGIRTPKEFKPRGMNLILARDCDDMGVKLTKKDKLASECLHCFWTRKMRKAPLDAPDPPGEDWMESATRVRSFASSLSEHSSHDYINVIETE

SEQ ID NO: 780 - protein, 2338 aa, Maize suscal virus
METFLDEQFDDMLSEFEQARLSRFPASHHSSALTYYPQRHILSLMSPNCPVKPTPLLRAYCDAVNKVSDLLGGGCDATDNPAPVYSYIFSQTTASSPAYYDPDYEDPYLLDSLRAASDAVLEDIEAIESHHPGFSLDNQKLRLLRKVSSRLHASCKQIFAVRRMLEKVRNQIQKCHIGVDHKLMPAVRLGNLSIHTVRDLIFVAGLQPFPMRIHILNYDQWLMIYDTVCCRAMVKVATLWNEELRTDNIPSWEIVSSVYKWGDALLTNYGVSAYAIIGEFESIVTGVLITFSDTDTLGLGASFVNSIMENAQEQSRAYNIPANETLKLISLLRTVESVNWLSELFGLRKHWGNPMVDARASGKAVQEKVDEVLPVKGTALVKLLASFNRMVTLSFISQHGQWPDGYYLSNSRDCPLKRAFESRSTRIPETVEGHRHEDWACFVFLPNCILDSYEDDLALISDKAVSVYREHLDSVYVRALCNKQSQGTVEEDRRLMLEYLRKQHMPILDIFKIVMTDAVPPRWMANCASMKGTEMKHLKARIFAVLTYEMRQYFAASEDILKNNLFKYNPHQTMTMSETELLTRLKSLTTQLDPNSQSRQLSVIHIVDFSKWNLRMRYTNTCLVFKSIDDFLGTPGLFENSHPLFSDMLNMVSDPFNPPALGVEETESDTIWRNHHAGWEGQRQKGWTILTSALLSDLERTTGVHSEICGQGDNQALLSKFPVPTIYRNPEEWIKSDPTEVRKVLDDFYLRLEKECEAVGLKIKTAETCRSLCFFNYGKRLYFKGSELSMTLKRFSKNITQPNDSYPTTEAILKTYEGSSYAAGLYSHPSLLPYWMSKFSVAHQLFNSFTNNQLCAEAPVQMMSTFGFPINYRLISTLMKIPASLGGPPQQCLADYLLRGHPDPLCTDLVGLTLKSKAGCVISKKIIRLAQSGKWFSQRTLTRDSLIKSPYSLNLRVPLSVRQPIEEAVLPAVRAHCNNNLVKSLFDSSMDDDERYILDSLGLMKPFHPLVANDIYSRTLPGRRQMFISGLANTTSLGRLIKGNSAFPLIYKVMDLEMEQLKSWIVQLTELLGLPDNDDIILPHHILAQQLREKSWNTVIEGITVPHPLEQFMLTLSKSDVCTNDCYTVEPEHIVLVQHSEDVVVSPGVDRDHITAARSKKGSPYLGSHIGEGIVQKQLICLNPDTSWRDVIRLNTIKRWVAPEGSRLRLFMNGIISSRTNISRAYIDLATGVPSRLSYNHRASLMGSINSCSISSTTNMHTRLYLSSNRMGDYSHGLKNYHMPFGPTFLCYQTLVCLIGIFSPEKWAFPRNVYHIHVRDSRVPPVYDGGLELEDLTVLDLKGHPPTILRCLASKLVFEAAPGYASFGFWCEFETASRTDAKYGYAQQLTGGLFIQETVVRESITHDRIGSFASRPAVISIGDISLIEPSLFLRSIAWGMLLLAPMHLLHFRGKYAFKVSCVEYVNLFSRAFWSSFESPMSNPRIIRKLGKHVALMSSHSLGRLDSGIIPALQIIIVEEMWCIIHSIATYFRRGGDKPNIPPIFAPSGSAALLLTSRVIEMMVTIRLVVGNCSISKIVGFPRDFSANLMSVPQPISAAALIVIQHDFLELQRHLKLPLRDMVIPRVFSTHYPWVDILRKTDSVEADDEDPQRQLVLPVDFPQCANVVEFRIPENPVLETTPQCDCKTTQRKRDLHDECFFSLSGNYSKSHLKILELIFSFHLPIANLCVLGSGTGSEACALSNYLDCRQVYVNCYHKLTDFSPHAASTYVPPAFRSDGIVTKLVSPASAVLSLSDLTDIRTADAIYQHLRGIATTGIICDAEIPSAATPLLYSQIMHTIVAVVRKKASINWVLIKVPIFCVHKLLGLAAPLAQAFHRIIFAYPDFGKPHSSLVYIVATIRAKATPIEENRLPTVMLEDEMLREMLASISSQNHCRLYEMRVADRISRLSLNLTLPQSLTVASNRFVQGLILTEDEISDPEQVIKVLKAVRQGLLTSAQKVVETHFRVHNEITMPRSAVLSADLGTLHGQLNNTYLKVAKCDLLLELLHLIHPTLEQIKNRVYSWLATAHSYRMRNRNFNVYINQTRFISHDSRYLFEILGHLMKRSVPTVGLPIHMDYHLFGSRTLRPKQLIVPCPIGVCRSPSGRTSKWKWQKRSEILGWAISLTLTNLPIAVEDHNSFSLDFLHEKGILEDVRMMASLNPSRIEVPYFFRPNEMALDLLAHDRLFLVAPLNSFSLLRSRYTTVEPYFVPWSGAPLAWCLFYLEERNQIDSLIVDEICLDDTLSVNTYVDTDSMSCRCLSCKTEEVLGERFSLNTNDLDFLCSLGSIETVYDSEHAL

SEQ ID NO: 781 - DNA, 4845 bp, Tomato brown rugose fruit virus
  source 1..4845: mol_type = other DNA
atggcatacacacagacagctaccacatccgctttgctcgacactgtccgaggtaacaataccttggtcaacgatcttgcgaagcggcgtctttatgacacagcggtcgacgagttcaacgctcgtgatcgcaggcccaaagtaaatttttccaaagtaataagtgaggaacagacgcttattgctactagggcatatccagaattccagataaccttctataatacgcagaacgccgtgcattcgcttgccggtggactacgatccttagaactggaatatctaatgatgcagatcccgtacggatcactcacatatgatataggtgggaattttgcatctcatctgttcaaaggacgggcatatgttcactgctgtatgcccaatcttgatgtccgcgacataatgcggcacgaaggccagaaagacagtatagaattatacctttccaggcttgagcggggcaacaaagttgtcccaaatttccaaaaggaagcttttgacagatacgctgaaacgccagacgaagttgtctgtcacagtaccttccaaacgtgtacgcaccagcaggtggaaaacacaggcagggtgtatgctattgcattgcacagtatatacgatatacctgctgatgaattcggagcggcacttttaaggaaaaatgtccatgtttgttacgccgccttccacttttccgagaatttacttctcgaagattcacacgtcaaccttgacgaaatcaacgcgtgtttttcgcgtgatggagacaagctgactttttctttcgcatctgagagcactttaaattattgtcatagttattctaatattttaaaatacgtgtgcaaaacttacttcccggcatctaatagagaggtctacatgaaggagtttttggtcaccagggttaacacctggttttgtaagttttctaggatagatacttttttattatacaagggggtagcccacaaaggtgtaaatagtgagcaattttacagcgcaatggaagatgcatggcactacaaaaagactcttgcaatgtgtaacagcgagaggattcttcttgaagattcctcatcggtcaattactggttcccaaaaatgagagatatggtcatagttcctctattcgacatatctctcgacaccagtaaaaggacccgcaaagaagtcttagtgtcaaaggattttgtattcacagttttaaatcacattcgcacttatcaagccaaggcacttacatactccaatgttttatcctttgtcgaatcaattcgttcaagggtaattatcaacggagtgactgccaggtctgagtgggatgttgacaaatctcttttgcaatccttgtccatgacatttttcttgcatactaagcttgccgttttaaaagacgaattgttaatcagcaagtttagtttggggccaaaatcagtaagccagcatgtatgggatgagatttccctggcttttggaaacgcatttccatcgatcaaggagagactgctaaatcggaaactaattaaagtgtcgggagacgcattagaaatcagggtgcctgatttatatgtgacttttcacgatagattagtgactgagtacaaaacatcggtggatatgccagtgcttgatatcagaaagagaatggaggagactgaggttatgtacaatgcattgtctgagctatctgtgctcaaggagtcggacaagttcgacgttgatgttttttcccggatgtgccagactttggaggtagacccaatgactgcagcaaaggttattgtggcagtgatgagcaacgagagcggactgactcttacattcgaacagccaactgaagcaaatgtcgcattggcacttaaagattcagaaaaagcctctgagggtgcactagtggttacttctagagatgttgaagaaccatccatgaagggttcaatggcaagaggagagttacaattggccggtctgtctggagaccaaccagagtcttcctatactcggaacgaggaaatagagtcattagagcaattccacatggcaacggctagttcgttaattcggaaacagatgagttcgattgtgtacacgggccccattaaagttcagcaaatgaaaaactttattgatagcctggtagcatcactctctgctgcggtgtcgaacctagtcaagatcctaaaggatacagctgctatagatctcgaaacccgtcagaagtttggagtcttagatgttgcgaccaaaagatggttaattaaacctttagccaagaatcacgcatggggcgttattgaaacacatgctaggaagtaccacgttgcacttttggagtatgatgagcatggagtggtaacttgcgacagttggagaagggtggccgtgagttctgagtcaatggtttattctgatatggcaaagctcagaacactgaggagattattaagagatggtgagcctcatgtcagcagtgctaaagtcgtcctagttgacggtgtcccgggttgtggaaagacaaaagagattctctcgaaagtaaattttgaggaagatctaatcttagtaccgggtaagcaggctgctgaaatgataaagaggcgtgctaatgcgtcaggaataattcaagccacaagagataatgttcgtactgttgattcatttataatgaattacggtaaaggaacacgctgtcagttcaaaaggttatttatcgacgaaggtctgatgttgcacactggttgtgtgaattttcttgtttctatgtctctgtgcgaaattgcatatgtttatggagacacacaacaaattccatacatcaacagagtatccggttttccgtaccctgcacattttgcaaaaatagaggttgatgaggtggaaactcgcagaactacgctgcgttgtccagccgacattacccactatcttaacagaaggtacgaaggatatgtcatgtgtacatcgtcggttaaaaagtcagtttctcaggaaatggtgagcggggccgcaatgatcaatcctgtatctaagccattgaatgggaaagttttgactttcactcagtctgataaagaggcgctgctttctcgaggatatacggacgtccatacagtacatgaggtacaaggtgagacatatgcagatgtgtcgttggtcagattgactccgacacctgtatctatcatcgcaggagatagtccgcacgttctcgtagctttgtcaaggcatacccaaacattgaagtattacaccgtagtgatggatcctcttgtaagtataattagggatttagaaaaacttagttcttacttgttagatatgtataaagtagatgcagggacccaacaattacaggtagactccgtgtttaaaggttctaatctttttgttgcagcaccaaagactggagatatctcagatatgcaattttactatgataagtgtctcccaggtaatagcaccatgttaaataactatgatgctgttaccatgaggttgactgacatttctcttaatgtcaaagattgcatattggatttctctaagtctgtggctgcaccgaaggatccgatcaaaccactgattccgatggtacgaacggcggcagaaatgccacgccagactggactattggaaaatttggtggcgatgatcaaaagaaactttaattcaccggagttatcaggaataatcgacattgagaatactgcatctttagtagtagataaattttttgatagttacttgcttaaagaaaaaagaaaaccaaataaaaatgtttctttattttgtagagagtctctcaatagatggttagagaagcaggagcaagtgaccattggtcagcttgcagattttgattttgtggatcttcctgccgttgatcagtacaggcatatgattaaagcgcaacctaagcagaagctggatacatcaattcaaagcgaatatccggccttgcagacgattgtgtatcattcgaaaaagatcaacgcaatcttcggtcctttgttcagtgagctcacaaggcaaatgctcgaaagcatagactcaagtaagtttttgttctttacaaggaagacgccagctcaaattgaggatttcttcggagatctcgatagccatgtccctatggatatcttggagttggatatttcgaagtatgacaaatctcagaacgagttccactgtgcagtagagtatgaaatatggagaagacttggattagaagattttctgggagaagtttggaaacaaggccacaggaaaactactcttaaagattacacagctggtattaaaacgtgtttatggtaccagagaaagagtggggacgttacaacattcatcggtaatacggtgattattgctgcttgtttagcttccatgttgcccatggagaaaataatcaaaggtgcattttgcggagatgacagtttactatacttcccaaaaggttgtgagtttcctgacatacagcatacagccaaccttatgtggaatttcgaggctaagctattcagaaagcagtatggttatttctgtggaaggtacgtgatacatcatgacagagggtgtattgtttattatgaccctttgaagttgatttctaaacttggtgctaaacacatcaaggattgggatcacttagaagagttcagaagatccctttgtgatgttgcaaattcgttgaacaactgtgcgtattacacgcagttggacgacgctgtgagtgaggtccataaaaccgcacccccgggttcgtttgtatataaaagtttagttaaatatctgtccgataaggttctttttagaagtttgtttatagatggctcttgttaa

SEQ ID NO: 782 - DNA, 10923 bp, Celery latent virus
  source 1..10923: mol_type = other DNA
atgagcaagagaatatatacgattattgttgttttgtgctttcaggtttgctttcaaaatctccgaacacagcctacacaatcttcacataccttctcaacaaatccggcgatccccggtaccgacgctcttcaatttgaagaaaacgcaaacttaacttactctaccataaaatacaatattttaaagtttaatttaaattacaaacaatcaatcatgtctgtggtctctttcgggtcaatcacgagcatggacttcgatgctgcatgtctagcagctatgatcgaaacccctggtggctctattccaccaactccacaatcaccacccacttcaccagtggcggtgaaacaaaggaaaattttaaattttccaattgccaaaatcaggacaactcctgatgcatcttttgagatgtgtgtgaagttccccgagagcttcattgattccttctgtgctcaagcacagaaagaattaaaatattggcacgctgctattacgcagttgaaattctttggtggtgagacaccaaagactcttgaaaccttggtgaaccaaggtcaagctcacactcaccaagttattttaaacttggttaaaatccttgatagtgctccaaaagcaattcaaggaaagaaggagttggaaaatttcttccagctgagcccacatggaaacaattccaaagaaccaattgacgttagtcgaaaggtttatatggaaccgtgcaaaataagtccacgcaagcgacaagtgtgctcctgtgacaatgacgatgatgcacattatcattgttactattgtgatattgtgtgttcaagcaaaaatctattgcaagaacacgaaagggatttttgcgaggatgcacagtcagtgcaagcatttgggtataaacttgagagtccaaatgtctttgacccaccccatgtgacgcagcaaaggagtgttgcaccatctttgggaaaaactttggaatctcctgtgaaatctccagagcagtcaaagccaaacctggagaaaagtttcccactagtggaatcttccaccaacagtggcatgatcttctttggatcaatagctaccatggttccgtctcatattgaaaaatatgtgaggaattgtgaaactgagaatccgattgatgcagctgcatcaaatttggcgatgcaagaagctaaaagctctggcgctccttgtatagtagtgcatcataaggcactaccaggtggaaagaaagattttctttttcctcataactctcctcaagttgtgagaactgaaaccgaagagccaattgctggtaccattgatagaccaacaataaaacgtgctttatttacccgcattaagaagaaagcacaagaaatttgtgtgaacccagggggaaccatccagagaaaaacaaagcgatggttgcggccagcggaagttgcacaaattgtgcgagctacctctgatccacaacatccattgttcaaggtggacgttactcaaattattgaagttgttcatcctgtttataggactgaaagaactgaagttgtgcagcaatgcataacaaggggaacgtacaaattgatgtctaaagcccaacaacggaaggcacgagcaatgcgctcagctggaatgttagtgatcactgataacccaacaacgcattgggtatctgaacctcagaaaatgctagtggtaaaggaaaaactgagcacaacaaagcatgtgaaactccggaatgttgaagtgaatgctgaatctgaaatgttttggggaactaaaacaaaggagggaccctcgaaaacagccttaaagcgctgtaagcgtaacatcgatcgcttggctcttcttgatccgcaaatgggtgagtctgcgaatggtgaatgttggatgaacacctttaagcaccatttaaaagtggggagcattgatattcttccaaataaggttcgtttaccaaaccttaggtcggcattctcacgatggatacctttggttgattatgttgaaattttgaaatttcattgtaagtcacaaccaaagcttaaaagggttgtgatacctactccagttacttatctggaaggttctagatatcacattcatgttggttatagcaagaactgctcatggattacggtcgaacaactaattaggcaattgcagactctgttaacatcatccaaatatggagaacattttaagagagcaattgttggtggtgaaccggaagacaaattcacaccagtggttcctatagttgacgtggaaactgagagagctaaatctagcttggcaaaatggacaactgcgcaacagagatatatgggatctattagaacccgaatcaactcacaagcagaaaaacataaaatcgattcggaaaaaaagatctggataccaatgaggcacgacacgatggatatgttaactccaccatatcttttcgaaaatgggctgagaaacaacgaagttcaacaagtcggccaggttcttggagattctgtagatcgtgctggaaacagttcaggtcagagttctcaatgccaacaacaaaatgtggcgcttgcatccgaaggaaacaacgacaacgtgataaacgagagcgtgcgcagcattcaaaacttagttactgccaatatgcagttgcaagagcaatgcaaattgttgctcgcctcacacgaacaagctatcatggactccgtagaacacggaaacttggagattcagaagcacgatgtagaggtctcgcagaaaccatcaacgaggaaaagcgactcacagaggaatttgcaaaaattctcattgaagaaaatagtcgcctcagaagagatgtcgagaacattgggcagaggatggagaaaatctgtcacctcaatcggtgttccaattgtgagtgcttccattgcagaagctttaaatcaagtcgttcaaaggggaaatacttcctggcttgatgtaggcatttctggaacattgttgaagcaatgtactctttttgctacgagaacttttcaagcgtattgtagctacaaattagcacgaaacgtgctgacattaaccgtgggagaattgtatgataatgtgaaatcatacatcaactctataatgggttccacagatcctgaagtgactggtttcttgtcgcaagtacgtagcgcaccttcaatggtgaagatggccattttgctcacaatgtttgctatctcggtgaaattaatgagaaaattcttcaaggtgaagaataatggaactagctttactgtaagcggagagaatgtctctgcaagccagttgcgaatctcagcacaggctcaagctcgatcaactgacaacatgaccccaactgtaaagaagctttgtagcattcttggaatgattggtttggtttgttgttgttacgatagaacaacatgggcatatcaaaaggattggatggatgcttggatcacaagtatcacatatgccggtgcatctgatagtatttgggaatcaatttcccatccatttgaaacattgcataacattgcagtgagtggaggagatcgttcaccagaaactacagctcgtttggagcgaattttggctggtgcagggttgaacgcacaagcccaagcacttgatgaatttggagcgtctagctcagtgatgggtcagacactgcaaaacatattggatgaggttgaaagtacaaatgtgtcaatcgttagtgaaatgaaagcattgccacactaccaccgaaatgccactaccttcaatcaagcggctcgtgatttagtgactgaaccagatgcaacatatcaaatgttgttaacagcagcaactggtactggaaaatcaacgcttttcccagtgcacctaaggtcacaatctcaaaagagagtcttgctgctcattcctctcgttgcagcaacacatggagtttaccagcgacttaaaagtcaaagggtgaatgatattggttaccatgctgattcaatatctgaaaacccaaatgctaaattaatcatctcaacatatggacacatgtgtgtgaaattacttggtggtcaaaacccttttgatcaatttgattatattttagctgatgaatgtcatgttgtaacactcgagactgttacagtgatatcccatttactccaacagcgagaaatggcgacgtggaaaacagttttcatgacagcaacaccattcaacaatatcacacttaatagtgttgagacagaacagcctgtaatcatgcaacagaccgagcatttccacaaccccaaaagctttgtagattttctaaaagctggcggcactgaaagagtgcaaacatatgctaagggaggctgcatcgtattctgttctacccaaaaagaaactgaggaatcagcgaaagctcttaaagcgagtggggttattgcactcttttaccatgcctctaaccgattggaatgggattcctttgcaaagaaaaatgagcgaagcatgggacaattaaatttttatctctttgctacaaatgcactagaatctggtgtgacgatccctatgaaaagttgcgttgattttgtaactaaaatgcatccagtagttggtggagataggaagactattactatggctccaacttcaattagcattcaagagcaattgcagcgtcgaggtcgagttggacgaacttgtccaggtgggtatctatacacatcagttggaaccccgttgatgtataaacttgacccagattcatccattaagtacttgttgtactgttggaagagtggtatcaaatgttataaggaagcattaaatattcctgatgaatgcacgataacattcactaaagagaaaattggtgctatttggacacatgacacaccgccagttgttacagcagccttagtggataattttggtgcagtttacaggaatgcaaacttcttcttagcatcacatcgaagaaattatgtggaaattccacatacaactgatatgattctgccctcaactctctcgacatgggagaattttgaattggatgggaatgaagtatcagatggcacacgaatgagagtaccacaaaatcatttctttttccgaaacgaaagggtccaagagagttggttgaaattgcaagctgcaattcttactgaactaactgaagcagaagccactaagaagcgagatatagttatcgagaatctgatggcgcgtcgagtatcgggccatcctgcttcgaagcttgaaatagctagaatgataatggccaaacaacaagtggtacaacaagcaagagacacgaaacgtgttcgagaaacccttagtgagagtatatctgattactccggcatcttctcaaacttttctggaatattttcagttcaagaaagattgaaaaaggcttctatcaaggctaatgaggaattagatatggttattcaggaaaatgaatcccatattttatttctacaagacatgataaaagaaactcctgagatcatccctgatatggctttagaggagcagatccaacatatggaatatgcaaaagccatattggaaaatggttggatcagtgggaatcctcaagcaaagcttctcattatgcgcacaacgcataaaaattttcatgatcttgttacaaaaaccaaggatgggacctatcgcatgaaatcatatgtgcaacgcatgttcgattttgtgaagaaacatccattgttaatttttatgtccattatgatgggaacgtcattagcagcaggatacttcatgatgagtaaagactctgaagatgacgatgcaatagtgcaggacaaggttttcaaacgcaatgataaggcaatgctggaatggtgcttgagaggcaaagcatgtaaatgtgacgccacacacttcgaggcacagtatgtacttgattcacgtcattatagaactattctcgaagattgggtaaagttcccattgcgagggttccacaatatacaaatagtaaactatggcacagtgagcaaatatgcacgtgctctagctttcctatcagtttgtgcactcttagctaacccgactatggtgtataatagcgcagcacattccatggctggaaatagtgagtataatgagtcagtagcaaaatccctaatgcacaatattctaagagattggaatagagtcccgctcatagacttattggtaaaagggatagatggaagtgatgatcgttatgatcagtacatacatgaattatatacaagtggaggcctaattgcatttgaatcagacactggaaagtttgaaggaaaaatgtctattagtcaatatcgaaaggatgctgctaaaggacaaacaaaacgtagtgcagcttcacggtcacgtgaagaagatcattatgatccgagatcatcaggtcgactcaagagtgggatcagacgagcatatcgtcaattctataatattgaagattctgatgtgcaggaaattatcctcacaaacaagaaaggagctccaattcttaaaattgggagtcttgatgaattgaaccaacatgttgatcttctaaaattctcagatccagaattgtatgagttgtatttacatgctcgagataaattggatcttgacgaacctgaaagttcaagcggcttcactggaaagtggggtgactatgcggaagatgatgaattcatgaagatgatatcagctttagattcgttaacaaaacaagcttcggaggaagcatttataccagttcaagtgaaacttcgagatgggcgaactgtccaggcaaatgtcgcacgttattggcaaaaagattatccaactggaaaatctgtgaagcaatgggctcaaactacttgggctccaccacaattcacagctcttcgagaaagggtaggaaaagctcttgaactgattcctgaatcgcgaccaattcatcttcatggaaaagtcccaaatggaacacttatagagttccaagatgcaatgaaagatctgcacgagaagacagcagtcaaggctgtagctgaggctaaaatcggagatactcaatttgaggcggatccttctgatgtaacaagccgggttggtgtggttatggtgaaaacatcagcaaacgctgaatgggaatcatggaaccaatgtgttgctttgaataacatagtgatttttccccatcattacacgcttaaagatggtaataatttgagattcaagttttcatcaagtgatttcgaaagcacctgtcacattgtggatgggtacaatgggcttgacatggcttgggctccaattaacgttaaaattcgtggtttgaagaagaaagtttgtttaggcacgccgcggaatggatcttacctatggcatttttccatgattaatcaagggaaagatttgccagaggctcgtcttatgggatactcctctgtaacgaaagtacaagaagagtcgcacccatccttcgattggacacatacagtctcaacgcaagttgggaactgtggtggaccctttgttgataaacatggtgtcattgttggatatcacactggagcttttcaattgggacaatttaatactttcctgggattatcagcaccactaattgcacatctgacaaaattggatgtcaaaccaagtgcccagccccaatcaaagatgatttggagggaagtggatttttatcgatcaccaaattacttacccccaaccattaataaccaagagccaattccagaggagtggagatatccagaaggtaaatctgtttacccatgtgttgatccaggatggatgggttctcgtttggtgaagggatcaggttttcgtctcattggaaaaatgcaacgtcatgtggaatattcaacgaagatttcccttaatgagcattttgacatgtggatgtctcaagagaaaactcaaaatgagttaactaggctgaacaaaaatcgtgtagagaaagggttagagaaagctttcatcagtcacacgatagcagctcagaacaaggaagctgcaattaaagatacgagcaagtatgctagaacaacgttgggaacatattcagaacctttgttgaaaagagcgactgctctgacaatccaaatgctcgaggagcatattaagctatgtaaacgccaaccactggatttagtctatggggatatggaatggaacacagcatgtggagcccagtacaatggattgaaatcagcatttagggatcaagttgttggcatcgagaatatggatgcttatggtcaatactgctgggagcgtttcaacgttccaaccgatcaatacaaaccatgcatttggacaaattcattgaaggatgagttacgaccaattgaaaaagtgaaggagaataaaacgcgcactttcactgcagctccaatcgagtttgtaattggtgctaaacaagctgttgatgcattcaatcatcaattcatggatgcacatttgaagctaccacataccgttggtattaaccaatggtcagggggttggcacaaactatacaagaagttgtatggtaaaaactttgtgtactcaagtggagatggaagccggtttgactcaagtccgtgtttctatatgttcgatgccttgtacacaatacgtacatattttgcagatcctgaaatacaccaggttctggagaatatctacttggaggtttgtcacactccaatagtgttacacgatgggaatgttgtgatgaagaatcatggaaacaatagtggacaatgttctactgttgttgacaatagtctcattatgatgattctatgttgcgcctcttatctagagcacactccagctaccatgcattccctcgatgcaataaaaagccattggcatttttgtgtgaatggagatgattatattggaggaatgtcaccattgttagcaagccatttgactaaagagaagatggcaaaaaccttcagtgacttccagttcatatatgagtggtctgattattcaccatcattatttgaacaagattatatgagtttaaaattcataaacattgttgaacgaaaaggacaaacaactggacaacagttaattgctccatggcgtgaagcatcacgacaactctccactttggctcacacatcaagtggtgcacctgaaatcaaattacaagttgctctaaccgagagggtgaaagcatgggttgataaagatttatttgatttcataacagaatactgcagatggctcgtggagtatttcgatagatttacgaacacgcaagcatggaatgaagctaagaagttatggtgggatgaacaacaaattttcaaccattatttcagttttgaaagcatttgcaatgcgccatactcacaaattgtaaacgaaactcctgatgagttctttgctaatggtgtgagagagtcccgaccattgcgaatcctacgcgatggcatcaaatttggtgttgctgttacagcagctaattatctgggaccaagcgatcacgatgtacccatgattgcaaacacaatgcttaatgttgccaagataggtctcgcaaattcaacagccgagcggattgaccgtatgctatttgggaaggaaaaccctgaacatagtagagcggattcgctagttgttgtaaaaacagagcaaacagatgcgacgatctgtttgcgaactcactgcaaatgccaagcacagcacttcgatgggaaatatgagtgttgggtgagttccccatctgttgctataaaaatgtttgcaacattaaagccccggattctttccacaacgaaatttgttggagttaagtttctaccaaaaatactaagagctcatgtatgggccttatacctatctggattctcttgggaagaaacaatgcaaattgtgcaaagtcactaccctggcgagaaacagcaaagaaaagcggattggttcctacagcaactgctgaaagagctagtattgatattcaaagtgaaagggtcgaagtttattgagttgggagagcatgctcaagttcaagggaaaactcaactcgactctacacaagttgatatggatccaaattttaatgctgcagcttatgctgcaactcttcgaggaggaccgcactggggtacacataattcccaaggtctgtttgatgctattaaggtattaaaccccaatgcagcaaatgttgacattgggaatgcgcgaactgcggttcagcgcgagatgcagcggttgatagctgccgatgctccgcgacaacaaccaccaccacaagttggtggaggacaccaacaaccacctccagctggaggtcaaacgcaaggccagcctggtggttacacaccgagccaggcatttaccaataaatttggtaatataatggctgagcccgatgcccccctcgtgctcgactctcaagcaacaatgagggaagttgcccaaattgaggcagcttgggctcgtcttctagaggtgcaatctctagagggtcttggttccttctggaactacatgttttcctatgtgggaaacaatggcacctcatctggaggtgatcccagggattacatccctgcaggaaatgggcgagttacacttgcccaactaaagtccaaagctcaaggtgagcaatggcgacgttattggcgtagtcatgcgtcagacatgagggatttcttgaggcttcttcaagcttcagatagacctttgcctattcgttgggcaagaaacaatggcattaaagatgccaattacgagattgcattcgattttgcggatgcactcccagatctctcagctgcacaaatgtcaattattttagcagctaagaaccttgccgtaaggcgaggtcaaggccagatgcttaatgctggcaccaaggttggaggtcggtcaagaaccgaaacctatgaccaggctgtccgcgatgctgcggatgtccaattcccaggagcataa

SEQ ID NO: 783 - DNA, 6096 bp, Black grass varicosavirus-like virus
  source 1..6096: mol_type = other DNA
atggatactctggagcacgctgaagccaatgagctagaagacgatgattactttcttcctgacgaaggacctcttcatgatatgcacttggctagtgcaatcaacttggatcagatacaggagttgatgtatccagggactataaagtacaagatagatattccctattatttaagggatgagtacatgctgatagaaagtttgtgcaaaggagacaagatcaaaatggagcttggaatgttggctccatctttgaaactgtccaagcctggaggagaattgtcaaccatggatttacctgcatataaagaaataggaaaccttgtctgtcaggctttgaggaatagggacatcatgattcctatctccatgaatgatgtggcgctgaagctcccaggagtaatagtctacaggtcatggggtatagcatttgcagaattgttgaagattatatgcacaagagcagaagtgatgaggggagggtctcagcctgtatatcaaggcactggaattgaagcaggtgcagcacattgtcagtttcaagtcaacggcaattggtaccagatcgttgcgaggaagaatctctcaacactatatgacaggcaagagaatgtaatgtatataggaaatatacactcattgcttttgctaatggataccatcggacagaggatttgtttaatggttgccaatcagatagcagaactttatgatacacctggatgggttgatcaaggaaaaattgaccaaatattatcaactggagatgacattctggaagaaatgggaaatgatggatatgaaacaattgctatgtttgaatctcttgttataggaaaggtgttgagagcaactcccgatgacatcacagaatgccataagtttttgtacaactgtatggatgaggtagaaaacatgctactaaactctgctatgagaggaagaatcattgaacttgttcacagatggttggccatatttgacagtttatcgatcaaagagttatcaaatgtcttttgcttatatcgatgttggggacacccggttgtaaatatctatgaagggatggagaaagtttacgacatcggcactgaagagaaagaagttagcccatgggtagcaactgacatattgtgtcagttcagaaaaactttcttgataaattattacgagaagcatcactactatccaaacgtcttgatatcagaagaggtagaaaactcatatgttgctcaatgcattaagaagggttcttcaatagaggagatgtatcctacttatgatactaaggacttcttgggaatcgaaatccagaagatatgggacattccaataacatttgacctttgtcacattcttaatgataaagcagtatctccgaaccagaaggagctaacagacagtgttgtcaggtaccaaaacactacaggaggtcagaacagaagagggctccttagatggttgagaggaaagagcttaaactgcagagagttccttcgggagatagatcagaacgggctccctgaggatgagtgtatcattggaatgtacgagaaagagagagaaatcaagatcaaagccagaatgttttctctgatgtcagaaaggatgagatattacttcgttttgacggaagaccttatagctaagcacgtgctggagctatttcccgcaataacaatgaaagattcacaaaatgtactccaaaagaaattttggaccgttggcggaatgggaaaagactccacattcgacgttaatatcaacatcgatttttcgaagtggaattcgaacatgaggaatgaattaactcaacccatgttccaacagttggataagatcttcggatataccaatttgatatcaaggacccacgagatatttgaatcatcgtttgtatattcatcttcaggcaagtatgttcccactgtaaagtttggaaaactccaagaggatcctcctatggcatatcgtggacataagggaggctttgaagggttgagacaaaaaggatggactgtagctacagtatgtgccttatctgcaattgctgagagaagaaatgtgagaacaaaactgatgggacaaggagacaaccagatagttagaatactgatgcccacccagagatggaaatcaaatgagcttactatcaaagaaatgatccaaaatgccaaacagatccaaaaagcctttgtaaccgatatggagagaacatttgaagaggctaaattgcctatcaaggtgagagagacttgggcttctacgagactatttatgtatggaaagatgatcctacatgacggagatgcgatgccccaatggttcaaaaaagtgctgaggtcatacgctctaaccaatgagggtcaagtcactgtagcaggggtggtaggaactattgctactaacatggcttcagcggcaggattgagtgaaatgcctgatgtcatgtatctcatatttgtagcaatgactgagtggtcgctcggttacttgttagagtaccacccattcacacggaaatgcatcctaagagaacatgagtaccatgtaaagatccccggagcacatagaggaagagattatagggtgaggtcagttaacaagagaagattggtagtttctatgatcctgataccaacggcagctggaggaagtgtaacagttcctctccctggattcattatgaggggattccctgatcacgcctcagaggcttatgcctggatcaagatgcttgcggaagtaaagagtccatacaaaacaatgttaaagaactggtacactttcatcgggaatgattctatccaacctgatatgttgatccagagcccgtcatcaatcaacttcttgaagccgccaacacccagctttcaagggagaatgaacgtaagagagctcttattgtctggagaatttgatcagaaccagttcatcaaagaagcaggaacaatattgggagtctttgacaggaagaaggtctgctctgcgatgttaacagacccaatgaaccctttcataacctcagaggtttattccacttatgcccatgtgtacatagacggagtgataaaaagagtagaaaacaccagtactatcaagaagttggcccaaaaggtgaaaaccaagactcaagtcattaaggcaatgatgtacaatgaacataacttcatcatgttcataagttggagagcaatgaaaagaggtaccatcgactatgattgtgcaacccagcaagctagaatggctaggaatattggttggggaagaacaattactggtgtgaccacacctcatccagtagaattggggattggtcatatatgtaaaggtagacaagatgaatgtcctccaacggattacatttatgtcagaataaatgaaaagggagaatttgtcccttatcttgggtcaagaatcaagtgtaaagtcgtatcagagcaagatatagatgccagaagagagccactgattgctgtgggttcgcgtatatgcaggtactcgtcgtggcttggaattggcccaaatctgatggaaattgttgagaaaaacctagctgttgtctgtgacacatctgtctatgacaaatttatagacgatgatccaaagggactgttgtcatcaggatctattgatcatagattcactccagcaggagcatctgagggagttttcatcaactatgcaccacagattggttgtaatgtgtacatgtcgagcgattgtatgccgacctatggaagaggccagaccaactacactttgcacttccaggctctatattgttggctgcaatacatctcatcaaggagggctgaaagtgtattcatgcatcatcacatagagtgtgaagattgtgtcgtaccaactactgatgaagtccccgacatccagtgcccctttccctatttcgataatatatatcccccaagagtaagggacagcatatcaagagccttgggattcattgataggaaaggaggactagatattatgagcaatgtaagatcattgtgtcatgaagctgaaccaggcatgtttgatgttagacaattgcaaaagggagtgatgtggacactagcaataaagatcggatttcgattgtaccatgggggattattcgggtcagatgataccagagttgaggaccttcaggagtatcccaggatttactcatataaattatacagagataccttactggtcaatgtggcacatgtgatgatgatgcttgcagccatagagatggataaggcacctgatggtgaggaactcgcaaaagtcagaagaagagcaactgataaactgttgtcgaaacccattggaagcttcaaggggttaggaggattaactctaggaaggactgatgagaatccagataacagtcatttgtttatgactggctcattcccagaaactgtattctcaatattgaatacttccaagactgcattaatagagacaattggtcagattggacgcttatccatcgaaggaatgggccatcttcctgtggccaaaggttctctgtccaataagcagtttcgatttctgataatgatgagatgtttgttagaatgcaggaactctcattactttcaacactttcagaagatcccagaggacgaaccaggacatccagcggaccctcaaaatgacgtttatagaatgcttgtcaaaactcccgttctagatatgagtctagacaagatggtcaaatcacttgctgttattaacgaaagaaagactcttccgataatcgaatggaataacatctccttcgaatcaacagaagtgatctgcaggacaggaactcccaggtccatattcatcggaaatagaatgatcgttgagcaaaatagtagaagagagtacagagaagtaactcttccaacatctagcatttacaagtgggctgggatcttgtttcacaaacccttgaaaagacatatcattgtgttgggagatggaacaggaggaacctcactgttggtgaaaacattcaatcaagactctacagtgtacccttgctcctatttagaaacccataagattattccccaagatatggaatgtttaatgcctcaattgtctagaggatatgagggaatctccgggcgagttttgttaaatgttccagatgatatcaaggatcctctctggtcagaaagaatgtctagtgagataaatgacatgggcgttgaaaggacctctatagtctgcgatatagagaccgttgggctatgtgttctccttgatgcattcaggagtttacctcaaggagttcaagtagttatgaaaacctatgccaaagatatattgactaatatcatgtcaataatgggcttgaatcaggtagaggtgggattttctccgcatctgaaccagagcaaccatgaagtgtttctaatgggacacatctcacagaattcttttccagatcctgacatgatgatcaatcaaatggtaaagctttatggtaaggtgagagctgatccaagatccagaatcctggaggaaatgaggatgataaacaaagtattcaagccattaaagaatacgtctgtgtctctatctctagctcatataaataatctgggaattactatgaccagggagatattacaactggatggacttgagatctggggatatgcactgcaatttgtaaatcgtcattatgttgacccatctcatagagcatttcttgctgacaagaaaacgatgaacaggaaaagaaagagagatttgacaagggcattcaggatattgctaggagtggttgtgaatccaggatacctggatataaaacgcaaatggggtattagaactcccaaggaattcaaaccaagaggaatgaaccttatactagccagagattgtgatgatatgggtgtcaaattaaccaagaaggacaaattggcctctgaatgccttcattgcttttggaccaggaagatgaggaaagctcctctagatgcaccagatccaccgggggaagattggatggaaagtgcaacaagagttcgatcatttgccagcagtttatctgagcactcttctcatgattacatcaatgtcattgagacagagtag

SEQ ID NO: 784 - DNA, 7017 bp, Maize suscal virus
  source 1..7017: mol_type = other DNA
atggagacctttctagatgaacaatttgatgatatgctatctgaatttgagcaagcacggctgtctcggtttccagcctcacatcacagctcggctttaacatattatcctcaacgccatattctgtcattaatgtctccaaactgtcctgtgaaaccaactccccttctgcgggcatactgtgatgcggtcaataaagtatctgatctcttggggggtgggtgtgatgccacagacaacccagctccagtatactcttatatcttctctcagacaacggcttcttcgccagcctattatgacccagactatgaggatccatacctgctggattccctgcgagcagcctcagatgctgtgcttgaagatattgaagctatagaatctcatcatccgggtttttcgctggataaccagaagttgcgactgctgcggaaagtctcttcacgtctccatgcttcctgcaaacagatatttgcggtgcgaagaatgttagaaaaagttagaaatcaaatccagaaatgtcacatcggggttgatcacaagcttatgccagcagtgagattaggaaatttgagtatacacactgttagagatctcatcttcgtagccggactgcaaccattccccatgcgcatccatatactaaattacgatcagtggctaatgatctacgacacagtctgttgccgtgcaatggtaaaggtggcaactttatggaacgaggaattacgcactgacaatatcccttcatgggagatcgtgtcctcagtttataaatggggcgacgcacttttaaccaactatggtgtctcagcgtatgctattataggagaatttgaatcaatagtgactggtgtcttaattacgttttctgacactgacacactaggacttggtgcctcatttgtcaactcaataatggagaacgcgcaagagcaaagcagagcttataatatacctgcgaatgagacattgaagctgatatcattgcttagaactgttgagtctgtgaactggctgtcagagttgttcggtttgagaaagcattggggaaatccaatggtggacgcgcgagcatcgggaaaagcagttcaggagaaggtagatgaggtattgccagttaaagggactgcacttgtgaaattattggcatctttcaacaggatggttacactgtcattcatctctcagcatgggcaatggccggacggttactacctctcgaactcaagagactgcccgctgaaaagagccttcgaatcacggtctacccgtatcccagagactgtggaagggcatcgtcatgaagactgggcatgctttgtgtttctacccaactgcattttagactcatatgaagatgacctggcattaatatcagataaagctgtcagtgtgtaccgcgaacacttagattcagtctatgtgcgggctctctgtaataagcagagtcagggcacggttgaggaagacagaaggttgatgttagagtacttgaggaaacagcatatgccaatactggatattttcaaaatagtaatgacagacgcagtgccgccccgatggatggccaactgtgctagcatgaaaggaacagaaatgaagcacttgaaggcccgaatttttgcggtgcttacatatgagatgagacagtactttgctgcgtcagaagacatactgaagaacaacttatttaagtataacccgcatcagactatgactatgtcagaaacagagctattgactcgactaaaatcattaactactcaattggatccaaacagtcaaagccggcagctgagtgtaatccatattgttgatttttcgaaatggaatttgagaatgagatacactaatacatgcttggtattcaaatctatagacgatttcttaggaactccaggcttgtttgagaattctcatccactcttcagtgatatgctcaacatggtttcagacccattcaatcctccagcgttaggagtagaagagacagaatctgacactatttggagaaatcatcacgcggggtgggagggtcagcgtcagaagggatggacaatcttaacatctgcactcttgtctgacctggagagaacaaccggagttcatagtgaaatatgcggccaaggtgataaccaggcactactaagcaaatttcctgtccccactatctataggaatccggaagaatggatcaagagtgatcctacggaggttaggaaggtgcttgacgacttctatttgagattagaaaaggaatgtgaagctgtaggtctgaagataaaaacagctgagacctgtcgaagtctttgttttttcaactacgggaaaagactctatttcaaaggcagtgaactatccatgaccctaaaacggttctcaaaaaacataacccagcctaatgactcatacccaacaacagaggctattcttaagacatatgagggttcatcttatgcagctggcctttatagccatccaagtctgctgccatactggatgagtaaattctctgtagcccatcaattattcaacagcttcactaacaaccagctttgtgcagaagccccagtacagatgatgtccacctttgggttcccgatcaactaccgactgatcagcacgttgatgaagatcccagcatctctaggtggcccacctcagcagtgtctggctgattatctgctacgcggccatccagatccactatgcactgatttagtcgggttgacattgaagtcaaaggccgggtgtgtgatctctaagaagataattcgtctagctcaatctggtaaatggtttagccaacgcactctgaccagagattccctaatcaaatctccttattctctgaacctcagggtcccattatcagttcgacaaccaattgaagaggctgtgctcccggctgtgcgagctcactgcaacaataacttagtgaaatctctatttgatagctcgatggatgacgacgagagatatattcttgactctttaggtcttatgaagccgttccatccgctcgtggccaacgatatttattcaaggactttaccaggaagaagacagatgtttatatcaggactggcgaataccacgagcttaggtcgcctgattaaagggaattctgcgtttcctctgatctacaaagtcatggatttggagatggagcagctaaaaagctggatagtccagctaacagagcttctcggtttacctgataatgatgatattattcttcctcatcatatattagcgcaacagctgcgcgagaaatcgtggaatacagtcattgagggcataacagttccacatccgttagaacagttcatgcttactctatcaaaatcggacgtctgcaccaacgactgttatacagtagaacctgagcatattgtattggttcaacactccgaggatgtggttgtgtctcccggtgtggaccgtgaccacatcacagcagcgcggtcaaagaaagggagcccctatcttggcagccatatcggagaaggcattgtacagaagcagcttatttgtctaaatccagatacttcctggagagatgtcattagactaaacactatcaagcgttgggtggctccagaggggtctaggctgaggttgtttatgaatggaattataagctcgcggactaacatatctcgtgcctacatagatctcgccacaggcgttccgagtagattgtcttacaaccaccgggccagcctgatggggtcaataaacagctgctctatcagttcgaccacaaacatgcacacaaggttgtacttatcctcgaacagaatgggagattattctcatggtttgaaaaattatcacatgcctttcgggcccacctttctctgttatcagacgctcgtctgcttgatcgggatcttttcacctgagaaatgggcattccctagaaatgtttatcatattcatgtcagagactctagggtgccgccggtgtacgatggcgggttagagctagaagacctaactgtccttgatctgaaaggacacccgcctaccatccttaggtgcttagcctccaaactggtattcgaagcagcaccaggatatgcatcgttcggattttggtgtgagttcgaaacagcatcgaggactgatgcgaaatatgggtatgcccaacagctgacgggtggtttgttcattcaggagacggttgtaagagaatctataacacacgacaggattgggagctttgcatcgagaccggctgtcatatcaattggagacatctcattgatcgagccatctctattccttcgttccatcgcctggggtatgctgttgctcgcacctatgcatctgctgcatttcagaggcaaatatgcattcaaagtttcctgcgtggaatatgtcaatcttttcagccgagctttttggtcttcatttgaatccccaatgagcaacccccgaataattaggaagctcggaaagcatgtcgcgttgatgtctagtcatagtctaggtaggctagattccggcatcatcccagctctgcagataataatcgttgaagagatgtggtgtatcatacattcgatcgccacctatttccgtcgaggaggtgataaaccgaatatcccccccatctttgccccatcgggttctgctgccctactcctcacctcacgagtgatagaaatgatggtcactatacggctagtagttgggaactgcagcatcagtaagatagtagggttcccaagagatttctcggcaaatcttatgagtgtgccgcagccaatatctgccgcagctctgatcgtgatacaacatgacttcttagaattgcagcgtcacttgaaactgccattacgggacatggtgatacccagagtgttctcaacccattacccctgggttgatatcttaaggaagactgacagtgtggaggcagacgatgaagacccgcagaggcaattagtcctcccagtcgactttccgcagtgtgctaatgtagtagaatttcgtatccctgagaaccctgtgttggagactactccacaatgtgactgtaaaacgacacaaagaaagagagatttacatgatgaatgtttcttttcgctgagtgggaactatagcaaatcccacctcaaaattctggagttgatcttttcgttccacctgcctatagcaaatctctgcgtgcttggctctggcactggttctgaagcatgtgcgttaagtaattatctggactgcagacaggtttatgtgaattgctaccacaaactaactgacttctccccgcatgctgcttccacttatgttccgcctgcattcaggtctgatggtatagtgactaagctcgtctctccagcctctgctgtcctaagtctgtcagatctcacggacatcaggactgcggatgctatatatcagcacttaagaggtattgctacaactggtatcatttgcgatgcagagattccaagtgcagcaactcctttactctactcacagataatgcatacaatagtggcagttgtgaggaagaaagcctctatcaactgggtgttaatcaaagtgccgatcttctgtgttcataagcttcttggcctggcagctccactagctcaggccttccatagaatcatctttgcttatccagacttcgggaagcctcattcaagtttggtctatattgtcgctactattcgggctaaggcaactccaattgaagagaataggctgcctactgtaatgcttgaagacgagatgctcagagagatgttggcctctatcagcagtcagaaccattgtagattatatgagatgagggtagcggatagaataagtcggttaagccttaatctaacccttcctcaaagcttgactgtggcttcgaatcggtttgtgcaaggcctgatcctcactgaagacgaaatctccgacccggaacaagttataaaggtactgaaggctgtgaggcaagggttgttgacctcagcacagaaagtagttgaaactcatttccgagttcataatgaaatcacaatgccgaggtcagctgtcctctctgcggatttaggaacccttcacggacagttaaacaacacatacctgaaagtcgctaaatgtgatctgctgttagagctgttgcaccttattcatcctaccctcgaacagatcaagaatcgtgtgtacagctggttggctacagcccactcgtatagaatgagaaacaggaacttcaatgtctacatcaaccagaccagatttatatcacatgattctagatatttattcgaaatccttggacatcttatgaaaagatctgttcccacagttggactccccatccatatggattaccatttattcggatctaggacactgaggcctaagcaacttattgttccttgcccaataggcgtatgtcgaagtccatcaggtagaactagcaaatggaagtggcagaaacgaagtgagatacttggttgggcaatctcattaaccctcacaaatttaccgatagcagttgaggatcataatagcttttcgctggatttcctacacgaaaaaggcatcttagaagatgttcgcatgatggcctcattaaacccatcccgcatagaggtcccttacttctttaggcccaatgagatggccctcgatttgttggcgcatgaccggttgttccttgttgcgccgttgaattctttctcactactcagaagccgttacacaaccgttgagccatactttgttccttggtcgggggcccctttagcttggtgtctattttatctggaggagcggaaccaaattgatagcctgattgtggatgagatctgccttgatgatactctgtcggtcaacacttatgtcgacacagacagcatgtcctgtagatgcctgagctgcaaaacggaagaagtcttgggagagaggttttcgttaaataccaacgatctggatttcctgtgttctcttggatctatagagacagtctatgattctgagcatgctttgtag

SEQ ID NO: 785 - DNA, 7954 bp, Horseradish latent virus
  source 1..7954: mol_type = genomic DNA
tggtatcagagccatgagtattgaaaaatacataagatcttcggatcaatataacccaataacaaggttatacgaggtatatacgcatataccccggatcggcagcgtagagatacgttttgctaagtcatctacatacggtgtagaggacacatccgctaggatgagcatgtatactgccatcagatccgtttgatggtgcgcgtactaagtataactaagttatataattgttgaaaaacaaaatggatttatatccaaccaaagaggaagatacccctcaaaatcaaactgagaaatacgttttctcaaaagaagattcatctggatattcggctgaattaatggtcaataatgacttattaaaaactatttctaaaactaaattaactttagaaaaagaaaaagtttttagaatgacaaatcctttaacctcaatggttaaaagcctgtgtcagagaaagaaccacatattctattgcgtaactacgaaagagttatcaatagatatttgtgaatcttcaggtaaagtctacttacctcttctaacaaatgaagagataaatgggcgattaaccaaagtcgatccaaggatcagacaaacactctctattgttcatataggtgcagtgaagatattgctcaaagcgcaattcagaaacgggatcaactctcccgtcaaactcgctctcattgatgaccgaatcaatgaccgaaaagactgcctcctcggagcagcaagaggtaacttaaactacggtaaatttatgtttaccgtttatccaaaatttggtgtaagtttaagaactaaaaggttaaatcaaaccttaagctttattcatgaatttgagagaaataatttaatgaataaaggagataaagttatgaccataacctacttagtagcttatgcactaacaaatagtcatcacagcatagactataaatctagttctaatattgaattagaagatgttttccaagaaattggaaacgttgaacaatccgaattttgcattattgaaaatgaagattgtaattgggcaattgatattgcacaaaacaaagctgaattgggtaaaactaaaaagcttatatctgataatcaattaaaaattgaatcaggagaatctagtaatggtgaattacatagattaaatgaaagcgttaataaattacgcgaaaaatttgtagaaatttgtgggtagaatgagtgatctcaccaaacttccacacatctacaagaaaggtgaaacgatagttcgtttaaagccactggcaataaacaagaacgatcgggtatatgtgtttagctccgctaaatccaatatacaatcaatcaccaactccttgaataatctcaatgagattgttgggagaatactccttgggacttggaaaatcaattcattttttggattatccaaagatccctcagagtcaacctcaaaaaacccatctgtttttgataatgctaaaaccatttttaagagtgggggggttgataatacagcgttactaaaagaaatcaaaacccttttagaatcgcaaaacactaggattaaaaacctagaaaaccaatcgaaatccttgacggataagattgaacctgaacctttaaccaaggatgaggtaaaagacttaaaagagtcaattaggtttatccgagataagttgaaagacataatcggataaaactggcgaatctaaatcagattcaaaaggaagtatcccaagccttagaagagattaggtctctaaaaaaggatacagaagccattctagcaaaattaggatcaaccgaacctaacaacctagaagccattgccgcaaagataatcaatgacgttacgaaagtaatacgagattgtccttgtaacaaggaaattctggaagcttttgctaagcaaccagagaagaaaggtgaaataatcccttccaataaacctggatcttcttcatccaagttaaagaagtattcgtaccccaatactggagtaggaaactcaaacctaggtagttctgaaaaccctaaagcccttacctggccttttggatcatagaatgcctagaaccgtgggtcaaaccatagatgacttctggtcaaatctaggtgtaaaccagctagatgaacatgagttcgatcttatgatcaacctcatgaccgacgatgatgtatcctcggatacatcctttgatagtttaacctctctcttttctgagttattacaggttgaacaggaaatcacttcggaagaagaaagatgccaacttcttgaaaaagaagacagttctgacgaatccatacccaacgattctgatgaagaaagcgttcctgaacaagtcaggatggaaaaaggcaaaggaccggccaaaccatacgactacttcgacaacgaaagcagcgatatggaatatggagattacaatccatacggcagaagcgggcaaacaaacaaacccgcaagaacacgaccaaaattggccagtgaaacacttggacgaaatccaaggattctcaatctcgactgcaccaacagtctgagagacagaaaaagattagtagaagaatggggagccgaaatcagcctcaccatccaaactaatctagacgaatattccgaccctgacatggtgttactattaatggagcatctgacggccggaagtgtcaaatcgttcatcaagacaacgaaatggagtgaactatccggaggaatctatgaccttgtcatggaaggaattcacgtcatgtttcttggcgaacaaccaaatgaagctttcgacaaagctaaagaacaagcagcagcaaaggacaaactccttaagatgcagctctgtgatatatgttctctcgacacattcacctgtgccttcgagaaagcattatacaaactcgattccggagactttcctccaattatcgagcaatatctggcgaaaataccggaggtaggcgccaaagcccagcagcgatacaaagaagaagctactggagcaatgaaatacagtcttggatttgccaacaagattgttaaggaagaattgaagaaggtgtgcgagctcaccagacttcaaaagaaactgaagaaattcagaaaaacctgttgcaaacaggttgaagaaagattggaatatgggtgcaggcccatatacaaaaagaaatccaagcggaggaagcccaaagtccgcaaatacaaaaagtacaaaccctttaaacgacgaaagaagtttaaaacaggaaagtactttcggcccaaaaccgaaaagaaagtttgcccaaaaggcaaaggaaagaattgcaaatgttggatttgcaatgtcgaaggccattacgccaacgaatgtcctaatcgacaaacttctcagaaggctcacatccttcaagaagccattcaacttggtctccagccagtagaagacgtctacgaaggagaacaagaagtattcgttatcgaatacatagaagtttcagaagatgaaacctcaacctctgaagacgatggaacatctacttcagaagactcagattcagactgagcaggtgatgaacatcaccaacccaaactcgatttacatccgaggaaggctatacttctcaggatacaagatcgtggagctcgactgtttcgtagatacaggagcaagtctgtgtattgcaagcaaacacgtaataccagaagaaagatgggaagcagctcccagaaagatcaacgtgaagatcgccaatgaaagcacgatcacgctcgataagatatgtcgtaacctcgacatcatcattgccggagaacgattccacattgacgtcgtcttccagcaagaaagcggtatcgacttcatcatcggtaataacttctgtcaggagtactctcctttcatacagttcacaggacacattgtgttcacgatgaaagatcaataccaagtaccaatcacgaagctccgacgagctttcaagagaggaattcctggatttttagaatccatgaagaagagatcaacggctcaacaacctgaaccgctcaacatctctacaaataaaaccgtttcactttcaagggggaggaggtttggagaaaaactcagaatcacccaagaaaggatggtaaaaatcgaagaactacttgaaaaagtttgttctgagaacccattggacccagagaagtccaaaggatggatgcaagccagcatcaaactatcggatcccacgaaggttatcaaggttaaacccatgaaatatagcccaatggaccgagaagaatttgagaagcaaattcaagaattactggacctcaaggtaatcaggcccagtaaaagcccacatatggcaccagcgttcttagtcaacaacgaagctgagaaacgcagaggaaagaagcgtatggtggtcaactacaaagcaatgaatgatgcgactgtaggcgacgcatacaatcttcccaacaaggatgaactccttacgctcatcagaggaaagaaaatcttctcttcctttgactgcaaatcaggattctggcaagttaggcttgacgaagaatcaaaatccttaacggcgtttacatgcccacaaggacactatgagtggaacgtggtccccttcggcatgaagcaggcaccatcgatattccaaagacacatggatgaagcattcaaagtgtttaggaagttctgctgcatatacgttgacgacatcctcgtcttcagcgacaacgagcagaatcatcaacttcatgttgcgatgattctccagaaatgctatcaacatggcatcatactttccaagaagaaagcacagctcttcaaagaaagaatcaacttccttggcctggagatagatcaaggaacgcatagacctcaatcgcatatcttggaacacatccaaaagttcccagatatcattgaaagcaagctacagcttcaacgattcctcggagtactaacatacgcctccgactacatcccgaagctagctcaaatccgaaagcctctgcaagccaagctcaaggaaaacgttcaatggagatggactcctgaggacacattatacatgaagaaggttaaaaagaatctcaacggattccctcctcttcatcatccccttccagaagagaagctgattatcgagaccgatgcatcagacaactactggggaggtattctcaaagctattcatatagatttatctactaacgaatctattgaattagtttgcagatatgcatcaggcagcttcaaacctgctgagcaaaattaccatagcaacgataaagaaacgcttgcggtaataagaactattcaaaagttcagtatttatctgacaccggtaagatttctggtaagaacagataatacgcactttaagtatttccttaatattaattataaaggagattctaaaatgggtagaaatatccgatggcaaggttggttgcaaaactatgtctttgatgttgaccacattaaaggcactaacaattgcctcgcagattttttatcaagggaattcaatggagcttagcgcgtcttttgaaatccgtcaacagaaacgcgacacgcgtaaaagatgacaccatacacttgtggtgagaatcaataggccactgcctatataaacactctatcaccgatctgaaaaactcagatcctcaaaatggaggaaatagataaactcttacttcaagagaaaatcttattactagagctcgatctagtaagggcaaagataagcctagctagagccacaggctcgatgcaacaaaaggaagaaattccttgccgtgaaacaccggtaaatactctcacgagtaaattggttattatggagccagggcaatcgtccaaatctataactattccagagcaaacggctcatggtaaagaatcaacaaatccgttgatggctagtcttttgccaaaagagacaaaggtggtacagaccactagactggttaaaccagaggactttttacgtccaaacatgggtattccaatcccagaaaaagctgagcctagcagttcagttggtcctaacaggccagaaaaggagattcaaactcctcataacaactactatgttgtatataacggtccatatgccggtatatatgacaattggggttgtgccaagtctgcgacaaacggagttcccggagttgcacacaaaaagtttgccactattactgaggcaagaaagtctgcagacgagttcaccactgctgcaggaaaagataggcttaacttcgtccccaaaggcgaattagtcaagccaaagacttttgcaaaggccgtaacaagccctaaaaagtcaactcaatggatcactctcggaactaaaaagcctaagaaggatccagaaccaaaggagatcgcctttcaaccggagatcactattgaagacttccagtatctctatgatcttggaagaaaatacgatggcgaaggagacaccaccttcttcaccaccgacaagaagaacatatccatgttcaacttcctgaagaatgcagatccacagatgatctcggaatgctttcaagcaggactaatcaagacgatctaccccagtgcaaatctgcaggagatcaaatatcttcccaagaagataaaagatgcagtcaaaaaatacagaacaaactgcatcaagaacactgagaaagacatctttctcaagatcaagagcaccatcccagtctggagtgctacagggcttttacacaagcctaaatacatgatcgagatcggtgtctcgggaaaagttcgacctgaagaatctaagtccatggagtcaacgattcagaaggaagaattaatggaccttgcggtcttaaaggcgcaaacattcattgacagcctaatgaagatcaatcaacgcgaaaagatcttcgtcaacatggtagactatgaaacactagtctactcaaagaacttgaagaagacgactcaggaagacaggagcgtcatcaacaagtttcagcaaaagctgattagtggaaaaatccttggattccactctccagcaatctgccagcacataaaggtgacagcagaaaaagaagattgtgactaccactgcaatcagtgcgaatcttcaaaaggaaaggctatcgtttgcgataagcctgccgacagtggtccagccgacaatggagggccccagacacgtgaagacgcgtctgccgacagtgggtctcggacaacagacaccacgcactcagcaagtggatgaaataattcatctgctgacgtaagggatgacgatcaatcccactatcccaagacccttcacttctatataagtgaagttgcttcatttggagaaggcatctcgaaatctcaacacaactcgagctctcccttctctcttctttatctctctaaatgtgtgagtagaatcccgataagggaataggtagctacagagatcccggcctacgggccaattaaggggatctcctaaaatgtttgtattttcctttgtattatccagaaataaataaagaaaacctttacaaaaacccgagtgttctcccgcctttctctaaatctcatgtatctcaatagatactccgtctgaatagcaatcctccacgggacgctgtgagcctggagacctgatgccgtttgaagctgaagaagtaccgccgaggcagggggccgtttagggaaaaagtaagcgaggctggtttggcagcagtgactcaacctagggagtattcagatagacggaggtagatgaaagacaacgagaaaacaggaagttccgacggacactgttcaggtcagatttatttaaatctgttaatactctcattaaggagattaaccctaattagtggatctaaggggctacttataaacccttatcaatttaaaatcttgttaatcaagaaactaaacaagtggtttaaatgccacaaatcaaccttccgcagcacgaatctggtcgtgcaaaaat

SEQ ID NO: 786 - DNA, 2613 bp, Bean latent virus
  source 1..2613: mol_type = genomic DNA
accggatggccgcgcgattttttttatcccttgatcctacggtcgcccgcaattcgcgcttggtccatgtgaatgtgataaaaagtgaccaatcatgtttcgtttgacgagtctaattattgtttcttcgtccccacgtgatggaccaagtgctttatatatttgaattaaatgcttatcctctttaattcaaaatgcctaagcgcgatgccccgtggcgcacaatggcggggacctccaaggtcagccgctccgcgaattattcgcctcgtggaggtatgggtccaaagatggacaaggcctctgcttgggttaacaggcccatgtataggaagcccaggatatatcgggtccaaagaggacctgacgtccctagaggctgtgaagggccttgtaaggtccagtcatttgaacagcgtcatgatatttctcatgttggtaaggtcatttgtatatctgatgtcacacgtggtaacggtattactcatcgtgtgggaaaacgtttttgtgttaagtctgtgtatattttaggtaagatatggatggacgagaatattaaattgaagaaccacacgaacagcgtcatgttctggttggtcagagacagaagaccatatggcacgcctatggattttggtcaagtctttaacatgtatgacaatgagcccagtactgccactgtcaagaacgatcttcgtgatcgttttcaagttttacacaggttctatgcgaaggtgactggtggtcagtatgctagcaacgagcaggctattgttaggcgattttggaaggtgaataatcatgtcgtgtacaatcatcaagaagcagccaagtacgagaatcacacggagaatgcgttactattgtatatggcatgtacgcatgcctccaatcctgtatatgctacgttgaaaatacgtagttatttctatgactcgatttccaattaataaatgttaaattttattgaatgatcttctattacatgagttacatatggtctgtctgttgcgaaagcaacagctcgaattacattattaattgaaataacgcccaaattgtctaagtacaacatgactaaatgcctaaatctatttaagtaagtcgttccagaaactcgaatcaatgtcgtccagacttggaaatttagatacgctttgtgtagatccagagccctcctcaggttgtggttgaaccttatctggatgtggaatatcctcgtcaaggagaacggtggatcctctactcttgttatcttgaaataaaggggatttggcacctcccagataaaaacgccactctctgcttgatgcgcagtgatgggttcccctgtgagtgaatccatgattgaagcagttgatgtgtaggaagatcgaacagccgcactccaagtcgattcttctacgtcggactgccctgcgttttgcaaaccggtgctgaggtttgatagaggggggagttgaggaagatgaatttcgcattatgaagcgtccacgcttttagatgtgcattctcttgtctatccaagtagtctttataactcgccccctctcctggattgcaaagcacaattgatgggataccacctttaatttgaactggctttccgtacttgcaatttgtttgccaattcttttgggccccgataagctctttccagtgcttcatctttaagtattgtggagcgacgtcatcaatgacgttgtaatctacattatttgaatagacaaaagaattgaaatccaggtgtccactcaagtaattatgagaacctaatgaacgtgcccacattgtttttccagttcttgaatcaccttcaatgatgatactaataggtctctctgtccgcgcagcggcaccccttccgaaataatcgtcagcccattgttgcatatccagtggaacgttgttgaacgacgattgtggaaatggaggaacccatggttccgggggtttttggaatatccttgttgcgtttgagaccagattatgatattgaaggaagaaatgttgaggttgttcttccttgattatctgcagagccgcttctgcagaacctgcatttaatgccttcgcgtatgtgtcgttagcagattgctgacctcctctagcagatctgccgtcgatttggaactctccccattcaattgtatctccatccttgtcgatgtaggacttgacatcggagctggatttagctccctgtatgttcggatggaaatgtgctgacctggttgtggagaccaggtcgaagaatctgttatttgaacattggtatttcccttcgaactggataagcacgtgtagatgaggttgcccatcttcatgtgtttctctgcatatcttgataaacttcttgttaactggagttgttagacgttgtaattgtgataatgcctcttctttggatatggaacactgaggatatgtgaggaagtagttcttggcatttaagcgaaagcgtttcgggagtggcatatttgtaataagaggggtgtacaccgattgaggctctctcaaaactgtcataatgaatcggtgtatggtgtacaatttatactagaaccctcaatctcaatttctgcacacgtggcggccatccgatataatatt

SEQ ID NO: 787 - DNA, 2756 bp, Rice latent virus 1
  source 1..2756: mol_type = genomic DNA
atggcgaatttctctatcctcactgactcggcctaccctacggttccttcgcctccaagtcaagcggtgtcggccgggtttgaaggtgctctgacgacgcttttcctcgtcgttatcggctctctattgttcgttggcgtgttctatctcggctgggttctctgcgtgaaggacctcgtcctcaccttcaaggcccgccgccaaaggaggaccgaggagatcggtttcgggaacactcccgcgagggttgatgccaggggggtctaagagggcctcgtccgggaaagatggttcgaggccgaagcgtcgcaagggagagcccgaggccgcctttagggcccgcatattgggctgggcctcttcccagttcgggaggagggtctacggtggcgttggttcgtcgcagagtgctccgctgcaggtgcggacgtacaagtgggagaatccggacaagagtgccattgctatcgataccggctccatatggatcgtcaatacgttggacgctggtaacggggatgaccagagacatactcacaagactattatctacaagatgctgtttcagggtacgatgtggattaatgatgccacgtcggcagtctgcgggccactgacagttcatttctggctggtgtatgatgctgcgccgaagggggttcttcctgcccttactgacatattcgaggagggattctctggcctgggttcaacctgggtcgttaaccgggacaacgttcaccggttcgtggtgaagaggaggtggcagatgcgactgatgaccaatgggcagaagccgtactacactaaccgcagtgggaacggagatcccaccagtgtcacgatacgggacttcaggaagttcttcacgaagctgcgtactgcaacggagtggaagaactccgcaacaggagggataggggatataaagaaaggggccctatatctttgtgccatgtgttcgcaggcacctgaggggtccgctagagctattaacctgggggtgaagtttaggggccagagccgcatatacttcaaatgtaccggaaatcaatgataataaaacataatattttattcagattccatagatccgttattacaaggcagtacagtttgtacgacgaagcacagtatagcgacggatggagcactgtgcgtagcgtccggaggaggttggtagggcggtattagggaagaagggcaacatacaataccatacacacattattacacactaagcacccgaagggtgcttgaagaaactatccccttcatacatgtaatgtatcacgcagttgctttcgatgtacttggtctgagccggtgtacattgactcagccagtcttcgtcttcatttaccaggacgatggaggggatcccaccacttattaccttccgcttgccgtacttaggattgacggtgtagtcacggtgacatccgattagctgcttccaattagggcagtacttgaacgggatgtcgtctataacattgtattgtgcggtggggtcataagtggtgaagtccaccagtccgttccaatagttgtgcttcccgaggcttcttgcccaggttgtctttcctgttcgggttggtccgcatacatatagggaggtatatcttctggcggttgttggagcatcctggatgtcaaatcatggacgtgctgtagatattcggcagtagttacatcaagataatccatgttttgacgtgtttgtgtgtatacttcttcacataccgtgtatgtctttatgttctctgtggcccactgactcagctgttcgctgcaacgtagctgatcagtggggacagagcttgcgtatggagttacggtggtggggaagagcttctctgcgctgtactcgaactgggccagcctagttgcccagtcgaaggggaatgtctggcgtaccatagagaggtactctgttttcgaggtggacgaggagatgattttcctcatcttggtgtccttggtgtcagatccaggggccctcctcttgagggtcttcttgctgaacggtttggcgttgtagaattcgccccattctgcaatactgacggttcccggcttggtgatgtagtctctgacctgcttgcagttctgagcaggctgacagttaggatgataagactgatagtcaaaaaacctagagtctttggtctccaggcggttagatagctgtaaaagggtgtgtaggtgaaaggatccatctttgtgactctcacgagtaacaagtatgtagataggtacacgactgtggagcagagtaagaagatagtgaaggagttcccaaggatcaacaggacacttaggataggtgaggaagaagtacttggtccgtacgctgaattggtgggaagtggagggatcggccatgagtgaagcggagccgttggatttggctgaaagggacgtgcgggagaatcccggttgtccaaaggctgcttttcccacaaatctataccctagaccagtgcgatgtgggaagtgccttaggtgggaaccttgggccggctatttatatgggtgtcaaagtggctgtagttgggccttggcccactccagccgggggccggaaagcgaaatcgcactgatataatgttaccagtgcgatttctctttccgagcgcgatagcgcgaggcgccgggttccgcgtaccttctacgctgggtcgcctttatgtgtgatgggacgtaaggggggattcccattaatttattagtgcgctccatgacatcggggg

SEQ ID NO: 788 - DNA, 2843 bp, Rice latent virus 2
  source 1..2843: mol_type = genomic DNA
atgtggatggaaagcggacacctaccgcaggtagggtatcaggtgcaaccttctccgccggccgtaacctcgacgttcgttggaaacgacggcgcctggaggtttctcgttttattgaccgcttgttcttgcctagcaggggcagccgtattcgcatgctggcgcatgtgtggtaaggacttgctcctgaccttgaaggcgaagcgtagcaggacgataaccgagctaggtttcggccagacgcctgaacagcgtcgagctggaacgagttctcaaccagtgggcgtcatcggctaacgatcgaggtggagtctggtcttttgggtctggtcagcgtcccagttggccctctagcccggcacggatgccggcgaggactggtagcgctcgtcgtaaacggaaggatgattgggcgtgggattcggccactcgtcgccgtgttcgtccgaggacgtcttatgttccccgtggtggtccgcgagttcgcaggcctagcctgcagtatgtgaatccggggttacttggttccaccgcggtacatgtggctgatacgaatggggaggttagaattataacaggatactcgcgcgggagcgacgagcagtcgcgtcataccaacgagactataacgtacaagttatcactggacctctatgtcacggtggacacagagtgccagaaatatgttggtaaaggcgttgcggtcgcatggttggtctacgatgcgcagcctacaggagagatgccggcagcatcgacaatattcccccatgttgcggatatggctactgcgccctgtacctggaaggtgggtagggaggtctgccatcgtttcgtggttaagcgtagatgggtgatcacgcttgagactaacgggcgtgtagccggtacggtctttcagggtgctaatggtgtcccaccatgtaatcgcacggtgtacttccataagttctgcaagagactcggtgtcagaactgagtggaagaacacctccggtggttcgatcggagacattaagacgggtgcccctgtacatagtgttcgcggcagggaaccagattaattacagagttcagggggttgtaagaaagtacttcaagtctgtgggtaaccagtaaaacggttacatgtaaaatagtttgtaataaaatgtcaattttattcattacaatacaggtggctgcgctaagcagctgttttgcaatacatacacactttacccaattatccctgggcggcgcgcggcgataagggaaaggggtaaacactaaacacgagactgaccttagttaacatctttccggcgctgttgcgccggtgtctgatataaagctgaaattatatagactcatattaaatatgatgcagttgctctcgaagtacgagagctgttcagcagtcattgctttaggccagtcgtcgtcatcgttaacgatgacaattgaagggattcctcctttgatgagcttctttttcccgtatttcggattaacggtgtaatccttctgagctccgacgagggccttccagcaaggacagaacttgaagggtatatcatctattatattatatagagcttcgggatcatacatcccgaagtctacgttattctggtagtaattgtgtctgccgaggcttctagcccaagtagactttcctgtccttgatggtccgcagatgtagaggctgattggtctcgcctgcttgcaaagcatgtatcatgtagccatcgtagatctgcctcagcgtcagaatgaggatggagcaacgaatatacctgcggggttacatggtagatgttctcggcagcccattctgtgagtgtttcatggcaatgaaacatggagtcattgaacggtggttcatatgttaccggtggatcaggaaatagcttctgagaagcatactcccaggcttgcagcctggcgcagtagtcgtacggaaaccacttcttgaccccgttcatgtactccatccttgaggtcgccgagcgtaggatgtcagccattatctggtctttagtcattcttcgtcgcttgttggccagctcggaggaggtgttacctccctcggccgagctggaggaatccccagcagctctcctaatcgtcgtagaaggtccagcctctccattcccagtcggaggaactccgaatgatcctcggggccgaaaggagcccttatgccattctcctgtaggatgtttgagaatataagccagtacagctttagggtttcttgtaccttgtatatttggatgataatccatattatcaaaaaaacttgagtcatgtgtgcgaatgcgatgacgagtctgagcaagagcatggagatggggagtcccatctttatgaagctcagaagcacataaaacgccgtaaggcctgagcagattccagaggaataagcccattgtatgaggctcttggctacatcgtggataagtgaggaagacatttttgttctggaaggcaaagttatgtggttgctcagatgcggattcagtgttggtcatagggttccaacacttagccgcaaaaccgaactccggtgttttactctctagaaccctcttacaggcgatacccgaacgacccaggcttgggccaatttatagttggccggggtttctttgccggcccataccgaggccaaaggggatcgccaccgcataatattacagcgatcccctttgggccgaggggacattcgtgcgctctgattgtccccgaggccttcgcaattaagcatctactttaataaagtgatagtgaaattacgcggtattgcgtgttatccacgccctagtggactacataagtgaggtctttgggctttgttgg

SEQ ID NO: 789 - protein, 679 aa, Horseradish latent virus
MKPQPLKTMEHLLQKTQIQTEQVMNITNPNSIYIRGRLYFSGYKIVELDCFVDTGASLCIASKHVIPEERWEAAPRKINVKIANESTITLDKICRNLDIIIAGERFHIDVVFQQESGIDFIIGNNFCQEYSPFIQFTGHIVFTMKDQYQVPITKLRRAFKRGIPGFLESMKKRSTAQQPEPLNISTNKTVSLSRGRRFGEKLRITQERMVKIEELLEKVCSENPLDPEKSKGWMQASIKLSDPTKVIKVKPMKYSPMDREEFEKQIQELLDLKVIRPSKSPHMAPAFLVNNEAEKRRGKKRMVVNYKAMNDATVGDAYNLPNKDELLTLIRGKKIFSSFDCKSGFWQVRLDEESKSLTAFTCPQGHYEWNVVPFGMKQAPSIFQRHMDEAFKVFRKFCCIYVDDILVFSDNEQNHQLHVAMILQKCYQHGIILSKKKAQLFKERINFLGLEIDQGTHRPQSHILEHIQKFPDIIESKLQLQRFLGVLTYASDYIPKLAQIRKPLQAKLKENVQWRWTPEDTLYMKKVKKNLNGFPPLHHPLPEEKLIIETDASDNYWGGILKAIHIDLSTNESIELVCRYASGSFKPAEQNYHSNDKETLAVIRTIQKFSIYLTPVRFLVRTDNTHFKYFLNINYKGDSKMGRNIRWQGWLQNYVFDVDHIKGTNNCLADFLSREFNGA

SEQ ID NO: 790 - protein, 358 aa, Bean latent virus
MPLPKRFRLNAKNYFLTYPQCSISKEEALSQLQRLTTPVNKKFIKICRETHEDGQPHLHVLIQFEGKYQCSNNRFFDLVSTTRSAHFHPNIQGAKSSSDVKSYIDKDGDTIEWGEFQIDGRSARGGQQSANDTYAKALNAGSAEAALQIIKEEQPQHFFLQYHNLVSNATRIFQKPPEPWVPPFPQSSFNNVPLDMQQWADDYFGRGAAARTERPISIIIEGDSRTGKTMWARSLGSHNYLSGHLDFNSFVYSNNVDYNVIDDVAPQYLKMKHWKELIGAQKNWQTNCKYGKPVQIKGGIPSIVLCNPGEGASYKDYLDRQENAHLKAWTLHNAKFIFLNSPLYQTSAPVCKTQGSPT

SEQ ID NO: 791 - protein, 354 aa, Rice latent virus 1
MADPSTSHQFSVRTKYFFLTYPKCPVDPWELLHYLLTLLHSRVPIYILVTRESHKDGSFHLHTLLQLSNRLETKDSRFFDYQSYHPNCQPAQNCKQVRDYITKPGTVSIAEWGEFYNAKPFSKKTLKRRAPGSDTKDTKMRKIISSSTSKTEYLSMVRQTFPFDWATRLAQFEYSAEKLFPTTVTPYASSVPTDQLRCSEQLSQWATENIKTYTVCEEDAPTTARRYTSLYVCGPTRTGKTTWARSLGKHNYWNGLVDFTTYDPTAQYNVIDDIPFKYCPNWKQLIGCHRDYTVNPKYGKRKVISGGIPSIVLVNEDEDWLSQCTPAQTKYIESNCVIHYMYEGDSFFKHPSGA

SEQ ID NO: 792 - protein, 382 aa, Rice latent virus 2
MTNTESASEQPHNFAFQNKNVFLTYPRCSQEPHTMGLFLWNLLRPYGVLCASELHKDGTPHLHALAQTRHRIRTHDSSFFDNMDYHPNIQGTRNPKAVLAYILKHPTGEWHKGSFRPRGSFGVPPTGNGEAGPSTTIRRAAGDSSSSAEGGNTSSELANKRRRMTKDQIMADILRSATSRMEYMNGVKKWFPYDYCARLQAWEYASQKLFPDPPVTYEPPFNDSMFHCHETLTEWAAENIYHVTPQARPISLYICGPSRTGKSTWARSLGRHNYYQNNVDFGMYDPEALYNIIDDIPFKFCPCWKALVGAQKDYTVNPKYGKKKLIKGGIPSIVIVNDDDDWPKAMTAEQLSYFESNCIIFNMSLYNFSFISDTGATAPERC

SEQ ID NO: 793 - DNA, 2040 bp, Horseradish latent virus
  source 1..2040: mol_type = genomic DNA
atgaaacctcaacctctgaagacgatggaacatctacttcagaagactcagattcagactgagcaggtgatgaacatcaccaacccaaactcgatttacatccgaggaaggctatacttctcaggatacaagatcgtggagctcgactgtttcgtagatacaggagcaagtctgtgtattgcaagcaaacacgtaataccagaagaaagatgggaagcagctcccagaaagatcaacgtgaagatcgccaatgaaagcacgatcacgctcgataagatatgtcgtaacctcgacatcatcattgccggagaacgattccacattgacgtcgtcttccagcaagaaagcggtatcgacttcatcatcggtaataacttctgtcaggagtactctcctttcatacagttcacaggacacattgtgttcacgatgaaagatcaataccaagtaccaatcacgaagctccgacgagctttcaagagaggaattcctggatttttagaatccatgaagaagagatcaacggctcaacaacctgaaccgctcaacatctctacaaataaaaccgtttcactttcaagggggaggaggtttggagaaaaactcagaatcacccaagaaaggatggtaaaaatcgaagaactacttgaaaaagtttgttctgagaacccattggacccagagaagtccaaaggatggatgcaagccagcatcaaactatcggatcccacgaaggttatcaaggttaaacccatgaaatatagcccaatggaccgagaagaatttgagaagcaaattcaagaattactggacctcaaggtaatcaggcccagtaaaagcccacatatggcaccagcgttcttagtcaacaacgaagctgagaaacgcagaggaaagaagcgtatggtggtcaactacaaagcaatgaatgatgcgactgtaggcgacgcatacaatcttcccaacaaggatgaactccttacgctcatcagaggaaagaaaatcttctcttcctttgactgcaaatcaggattctggcaagttaggcttgacgaagaatcaaaatccttaacggcgtttacatgcccacaaggacactatgagtggaacgtggtccccttcggcatgaagcaggcaccatcgatattccaaagacacatggatgaagcattcaaagtgtttaggaagttctgctgcatatacgttgacgacatcctcgtcttcagcgacaacgagcagaatcatcaacttcatgttgcgatgattctccagaaatgctatcaacatggcatcatactttccaagaagaaagcacagctcttcaaagaaagaatcaacttccttggcctggagatagatcaaggaacgcatagacctcaatcgcatatcttggaacacatccaaaagttcccagatatcattgaaagcaagctacagcttcaacgattcctcggagtactaacatacgcctccgactacatcccgaagctagctcaaatccgaaagcctctgcaagccaagctcaaggaaaacgttcaatggagatggactcctgaggacacattatacatgaagaaggttaaaaagaatctcaacggattccctcctcttcatcatccccttccagaagagaagctgattatcgagaccgatgcatcagacaactactggggaggtattctcaaagctattcatatagatttatctactaacgaatctattgaattagtttgcagatatgcatcaggcagcttcaaacctgctgagcaaaattaccatagcaacgataaagaaacgcttgcggtaataagaactattcaaaagttcagtatttatctgacaccggtaagatttctggtaagaacagataatacgcactttaagtatttccttaatattaattataaaggagattctaaaatgggtagaaatatccgatggcaaggttggttgcaaaactatgtctttgatgttgaccacattaaaggcactaacaattgcctcgcagattttttatcaagggaattcaatggagcttag

SEQ ID NO: 794 - DNA, 1077 bp, Bean latent virus
  source 1..1077: mol_type = genomic DNA
atgccactcccgaaacgctttcgcttaaatgccaagaactacttcctcacatatcctcagtgttccatatccaaagaagaggcattatcacaattacaacgtctaacaactccagttaacaagaagtttatcaagatatgcagagaaacacatgaagatgggcaacctcatctacacgtgcttatccagttcgaagggaaataccaatgttcaaataacagattcttcgacctggtctccacaaccaggtcagcacatttccatccgaacatacagggagctaaatccagctccgatgtcaagtcctacatcgacaaggatggagatacaattgaatggggagagttccaaatcgacggcagatctgctagaggaggtcagcaatctgctaacgacacatacgcgaaggcattaaatgcaggttctgcagaagcggctctgcagataatcaaggaagaacaacctcaacatttcttccttcaatatcataatctggtctcaaacgcaacaaggatattccaaaaacccccggaaccatgggttcctccatttccacaatcgtcgttcaacaacgttccactggatatgcaacaatgggctgacgattatttcggaaggggtgccgctgcgcggacagagagacctattagtatcatcattgaaggtgattcaagaactggaaaaacaatgtgggcacgttcattaggttctcataattacttgagtggacacctggatttcaattcttttgtctattcaaataatgtagattacaacgtcattgatgacgtcgctccacaatacttaaagatgaagcactggaaagagcttatcggggcccaaaagaattggcaaacaaattgcaagtacggaaagccagttcaaattaaaggtggtatcccatcaattgtgctttgcaatccaggagagggggcgagttataaagactacttggatagacaagagaatgcacatctaaaagcgtggacgcttcataatgcgaaattcatcttcctcaactcccccctctatcaaacctcagcaccggtttgcaaaacgcagggcagtccgacgtag

SEQ ID NO: 795 - DNA, 1065 bp, Rice latent virus 1
  source 1..1065: mol_type = genomic DNA
atggccgatccctccacttcccaccaattcagcgtacggaccaagtacttcttcctcacctatcctaagtgtcctgttgatccttgggaactccttcactatcttcttactctgctccacagtcgtgtacctatctacatacttgttactcgtgagagtcacaaagatggatcctttcacctacacacccttttacagctatctaaccgcctggagaccaaagactctaggttttttgactatcagtcttatcatcctaactgtcagcctgctcagaactgcaagcaggtcagagactacatcaccaagccgggaaccgtcagtattgcagaatggggcgaattctacaacgccaaaccgttcagcaagaagaccctcaagaggagggcccctggatctgacaccaaggacaccaagatgaggaaaatcatctcctcgtccacctcgaaaacagagtacctctctatggtacgccagacattccccttcgactgggcaactaggctggcccagttcgagtacagcgcagagaagctcttccccaccaccgtaactccatacgcaagctctgtccccactgatcagctacgttgcagcgaacagctgagtcagtgggccacagagaacataaagacatacacggtatgtgaagaagatgctccaacaaccgccagaagatatacctccctatatgtatgcggaccaacccgaacaggaaagacaacctgggcaagaagcctcgggaagcacaactattggaacggactggtggacttcaccacttatgaccccaccgcacaatacaatgttatagacgacatcccgttcaagtactgccctaattggaagcagctaatcggatgtcaccgtgactacaccgtcaatcctaagtacggcaagcggaaggtaataagtggtgggatcccctccatcgtcctggtaaatgaagacgaagactggctgagtcaatgtacaccggctcagaccaagtacatcgaaagcaactgcgtgatacattacatgtatgaaggggatagtttcttcaagcacccttcgggtgcttag

SEQ ID NO: 796 - DNA, 1149 bp, Rice latent virus 2
  source 1..1149: mol_type = genomic DNA
atgaccaacactgaatccgcatctgagcaaccacataactttgccttccagaacaaaaatgtcttcctcacttatccacgatgtagccaagagcctcatacaatgggcttattcctctggaatctgctcaggccttacggcgttttatgtgcttctgagcttcataaagatgggactccccatctccatgctcttgctcagactcgtcatcgcattcgcacacatgactcaagtttttttgataatatggattatcatccaaatatacaaggtacaagaaaccctaaagctgtactggcttatattctcaaacatcctacaggagaatggcataagggctcctttcggccccgaggatcattcggagttcctccgactgggaatggagaggctggaccttctacgacgattaggagagctgctggggattcctccagctcggccgagggaggtaacacctcctccgagctggccaacaagcgacgaagaatgactaaagaccagataatggctgacatcctacgctcggcgacctcaaggatggagtacatgaacggggtcaagaagtggtttccgtacgactactgcgccaggctgcaagcctgggagtatgcttctcagaagctatttcctgatccaccggtaacatatgaaccaccgttcaatgactccatgtttcattgccatgaaacactcacagaatgggctgccgagaacatctaccatgtaaccccgcaggcgagaccaatcagcctctacatctgcggaccatcaaggacaggaaagtctacttgggctagaagcctcggcagacacaattactaccagaataacgtagacttcgggatgtatgatcccgaagctctatataatataatagatgatatacccttcaagttctgtccttgctggaaggccctcgtcggagctcagaaggattacaccgttaatccgaaatacgggaaaaagaagctcatcaaaggaggaatcccttcaattgtcatcgttaacgatgacgacgactggcctaaagcaatgactgctgaacagctctcgtacttcgagagcaactgcatcatatttaatatgagtctatataatttcagctttatatcagacaccggcgcaacagcgccggaaagatgttaa

SEQ ID NO: 797 - DNA, 38 bp, synthetic construct
  source 1..38: mol_type = other DNA
ccactggattcagcgaagttatgcgtaaaggcgaagag

SEQ ID NO: 798 - DNA, 20 bp, synthetic construct
  source 1..20: mol_type = other DNA
ctgagtccagctacgagcag

SEQ ID NO: 799 - DNA, 19 bp, synthetic construct
  source 1..19: mol_type = other DNA
ccactggattcagcgaagt

SEQ ID NO: 800 - DNA, 21 bp, synthetic construct
  source 1..21: mol_type = other DNA
aacttcagcgtcagtttacca

SEQ ID NO: 801 - DNA, 23 bp, synthetic construct
  source 1..23: mol_type = other DNA
  misc_feature 1: note = 5' 6-FAM 520 fluorophore
  misc_feature 10: note = internal ZEN quencher
  misc_feature 23: note = 3' Iowa Black FQ quencher
cgagggtgaaggtgacgcaacta

SEQ ID NO: 802 - DNA, 20 bp, synthetic construct
  source 1..20: mol_type = other DNA
cctgctgtccatctgctctc

SEQ ID NO: 803 - DNA, 20 bp, synthetic construct
  source 1..20: mol_type = other DNA
ctgagtccagctacgagcag

SEQ ID NO: 804 - DNA, 20 bp, synthetic construct
  source 1..20: mol_type = other DNA
  misc_feature 1: note = 5' SUN 554 fluorophore
  misc_feature 10: note = Internal ZEN quencher
  misc_feature 20: note = 3' Iowa Black FQ quencher
acaagactgacagggccaaa